United States Patent Application Publication US 2026/0265781 A1 - sequence listing, part 17

SEQ ID NO: 118 - DNA, 18231092 bp, synthetic construct (residues 8,102,709-10,128,385 of 18,231,092)
  source 1..18231092: mol_type = other DNA; note = Hot spot 2 - Chr 3 contig ref|NW_020822577.1 from Cricetulus griseus
ttaccaggctgccagggaaacatgggggtagaaggagaaaccatatttggacagtcaaatatgaatagtcacccctttactcacaaagccgataaaaaatgttctcaattaaaaatctgtgtgctgcccaagaaataggtagatggagattcagaaacagagaaagcaacacaggagagcagctgagtatgaagagaagcaggccagagatgagccagtgggaacaagactgtgaccacaaagggagcggaggacaactctacgggaaataagagagtggaaacatgactggccgtatttgtccacatgaaaaaaggggggtatcaaaaatgttggggcagtggtgagactgtatgcctagcacgtgtgtccaatccccagaaacaatcagataaataaaccagaggcagagtgaagtatggaggcaccaaaaatcactataaaacaataacagctatggtcaattcctgaaaaaatggaaggttgtaagagaaaaaaagaaaaagaaatgtcatctttatactacgtgtctcagcagacactgagttgctgtgaacaagtaccaaattaaacaagaaatcaggaaagaactgctttgaaaggaggaatgggaatcgaggcaggaattgatcattatgttctaccttttgaagtatataggtagtacttggtatttttaatatctaatcttataaggcaagtgctaatataaggatcacagctagggatggggaggcagctacgtggcaggcgggagcgtggaggtacctcccaggagcagctgggggccaggcctggaagaagcagcgcgggcaactcccgacattaagctccacacagaggccacagttcttgtttagcaaacgggaccacagatgggaatgtcaacagcatcctcttgccaatggtcacagggagcttcagcctgtctgttgctacagggtttgtcaaattccacccagcgaaggctctcactgtctgcaccgggtaccaagagggttccgcctccaaatcaaacaccagttctgtctcaccaatgcctatggcacattagaggggttcaaagttagggtgcccatagctcggtaccttctcacaacctgcacagccaggaacgcccttggcagagcttgcagcctggtaagggctggccaccagggtggcagcagaggacaccgttaccagactttcagggggctccctctgtccctccttgccctcctgttctccagggaagtcagctcagtttctttaaggtattctgcacttggtgctatcctcagcgtgatttcccatcctgccaggggacaggagctgtgtcccatagtcaccttggctctttcaggactcacatgcctgaatgaatgaatgacacttcacagagcctacccacagactgttgagtggatgaaacttccaacatctaaatttagcttgaggtgtgagggagaatataaggaactaagtaacaaactcctgggaatgggggtggggacaggtaatggaagctctcgctgcaacccgggtgttaatagcagagcctttcaggcagccttagcagggagtgagccatctgctcagaagcagcaattaggccaccgcagcccgggagccagagccacagagccacgtgcctgcagctgtgagctgagcatgaattcatcgggacgctctacccctgccctctcgacagccggcctcacttgcatagttacctgctacctggtcggtcagctggcagagtcatcgatcagggtggctttggtcctcaagaggaaaaaccattgttttcagaataatcagaagcagaaacaaaggtggcctggagtaagaaaatgaggacaaagcacaccaaatcccttaagaaagccctccagaggccatgtgctgaggcctcccagcctctgggcggagcctcttcctcaggctagagtggatctgctccacttgatgtctcctagtaaatgcctgaactattttcatttctttttttaaaggtgagaggaaatagtacatttacccaggacagacagtcccatgcaggcaaatgtaaaaattcggatttgattgggctggaaatacatattggtgtcaaacagtgacatttgtgtgtacagatgtcttcaggcagaaatggaggagtggattaactaggcttcatagaaccagtcaatctcttttaagacattgttctgaaaacaatagagggggtggggggtaccctgaggtgtgagactgtgagccactaagctcagagggcatgggggctttgaaatcagatctgctagggtgcacaaacagctggggggtgggggcagagcaacgggagaaacagcaaaaccgaggccggggagaggcaagctggatactgcagaggcctttgctctggcatctacttccaccgggagcccgagccgtagagggcacaggcagatatgtgttggagccacagatgtcttagtcggttttgtgttgatatgaacagactactgcagcctggggaatttgtacaagagcagaggtttgtctcctacagttctgatggctgcggagtccaaagtcaggaggtaaagctggtgaaagcatccttgctgcaccttcccagggcagaaagaagggaaagagaacaggaaagagggggctggcctctgtacccactcccaagataatgccactaataggggccgaagccagctttcttaatcatctcatactaaatcccagatttcaaggcagttacatcaggagttgcatacacaaaccatgccaacaattccttttgcaagaaggagaatgggttggataggtgttagtggcagacaaaaacctgctaaggggtgtgtccaatggtccagaagcaactggattgagagcctggatgcagtcagtaaaaatgcaggtagaggaaggcaatggccgcgacactgatggagagtattcagggtagacctgtatggagataagggatgactcccacatcactgaggtggatggggcagaccacaaacatcactgaggcagggaaaatacggtgagaagcaattggaaggcagggtataattctatctagaccaactgagatttgtggcaggggcaatagagtgaacatatccacaggcacctaaaactccttgtcggggccagaaatatgaaggagaaaacatggaactccaggggtgactgaaaatggtaggggaggtgacacagtttacggagtggactgagaaaacagcctagatcctgaagagaggggaggggtggtcaaaggaaggaagggcagaagagagcaataccctaccctcatggcagatggggtgcagagaagtcaagtcctgttaagcctgagaaagaaaagagctcacaagacccaccgctcactcagatctgctgttcacacgtcttccgaggtgacatttaccaggataatttcagtggcgtggtgggggtggaaccagattgctgtgggttgagcagttaagttgaggatgagggaagaaactaaatgtgaactgtatctccaggaattcccccccggggggggggtaaaaagccaagatcaaaaggggactcagtgagaagagggactagcaggcagtgatggggtggggatagaaggcgtcgttatcccggccaaccaccgcccctccagcctgccaggtcccgaaaactctgccgtctttccatggtgtgatccctcccagagctagagtgagactcctgagaacagggtaccacacctgctactcactaggatctcaaaactatgaaatctgtaactcccgaagtccacggcctgccttcggagtctatgatgactcagtcacagagactgcatgaagcttacgaggcctcccgagatgggtggggagtcaggtaacgtgaattggtcaagctccgtggatgatgcatcagagaccctgcgagatgcagaagcctggcacccattgcgttccaaaaatgggccaaccccaaggcctgcccattacaagtgtcctcacttgtcatcgtaaggacacttgcagcagtcctgagggaggcagatggcaatctgttcagtcaacagagctgagactctctttcccccagcccccctctgacagctgcccttgaagctgtctctcgttattctccccccacaagaggttgctgaaaagagagtatcatcatcttgctcaaattgccgtctttgaagttgactacacacacccgaatccttgaagagtttctggcttgtgctgcaggcctttgggtttgtctataccctaagaacagacctgatgttgtcacgaagcaagaaacacctctgcctgagaaccagggagttacagcctggttgtcacttctcccctcagcattgctcagcccttgtgccctgtctcctagaacagaaatctaggttctggcttctctgaccctctggtgggtcaaagggaccaacccttgtaatacctgaccagctgagggctctgcttgaagggcagacccagatgggcatccacacggcagctgtggttaaaaaccagtcgcctcatgttttaaaaggtgattcaagaaatatttcatgagagccacatcattgtcataggtaaggaagggccacactgtcctttagattcctggtatttggaggtggcttccttccacaggtcatgatatcaaacctgctgcggccattggaagaggacgaggtagggatattaagtcctcacaagaggggcatgtggcccttagtcctgtgacctcagaggtagggacgttagagagaatgctccagcaggcacccagtgagaaagaacaccaggctgccagcaccctggaggaacaatccttcattccccattgtttgagaaatataataatggccccggcagaactggcttctaagaaaagacagagtcatcacacaccagcctgtgctttacacatattctttttagtatggttgcatgtggatgctacttgctctaggacaggcaatgatggctcttagaacagtgaccctgatagctcgaacacgcacatctgatacaaaaagtcctaaagcccctcattttaatgtgtgaactgcaacagtctggtgctgcttgctgttgtatctataaatttctttacaaagcccaaaggtaaggagtgtcacagaagtactgagtgggccttcctgggattcctgcctctgggcatgtctgtcatcctgtctgtcctattgcaaggaacccaaaaaactgcagagccagatgcctgtctgggtacttggcaggccacaggcactgctgcaattagcaggctggttcatgattcagcgtgaggtgcaggcagcctccaccagagcatagcggacagtttaaaaatagcagagctgagctgatcttgccagcccaggctatgggagaagtacggcagctgctgcaggcagaacctgaagcatcccaccacccctctcgttccctttccagatgtgcctcccagctgggtggggagtagcagggagtcaattcccataaactccccatgcagaacagaagacacaagtcgggaggccctggtttacagacaaggcactgaaccattcacaggtccaggctgactttaaaacagggatggacacctctcccccttgtcctggacacaaaaggactacagggcagctttgcctgcaggtggcactctcaattcaataagggcaacaccaaagagcagtttcagctacctgccaatgcacacataacatctgtcccttgttccatcctcactaccctccttttagcacagtcaaattgcttcccggggtcctggagtcagatttaaaaagcagctcaggagaactcgtctgctgatcatgtcgggagtgaatgagactcacgccagtgcagaggagggcagctagcactaatgagctttgtacgtctatctccttcccttccacagctcttcagagtcatggctgaggtctgcccagtggattgaagcctcagggagaacatgacctaccacagaaggacctcagagtcctcctgtcagcctggttttcactttggtcatgttctctgggtcatcgtattttctagatgaaactgcaatgtcttcaaggctgctgctttctttaaagatgtcctttctacccaataacccaagaggcgatttaaaataatggagagctttgccatttttctgaggatacggtatcgaatacatgtcacttgtccccaaattaatctgcaaaattaactaaatgattctaaaatttatccagaagaataatttcctgggactgagaccatttgggaaaaaccaaagagtaatgagtggggatttgttctatcagattttaaaggatacagcagtaaaataggagggtactggcaaacgaggagacaacaaatcaatggtataatagaaggcccagagccttcccaaatatctacacaatgtcagtgtgctgtggagatgctatttcaaaacagtgggagaggatgggcgattcggtaagtactgtttccataactagccagctatttagataacaataaacaataaactcctcccaggacacacacaggaactcccagactgcctacacatttcaatggagaaactataggtggatatttaattaaccttgggttgtcgacaggaataatgctggtgaaactttcgtcaacatgaccaaagacagacaacaccccagggagtggacgtctgaaaacagtcttttctaagtcacgagaaaaggtatcagtagaaaagctgacaaaggggtaagagcaaagatgctcagcagttaagagtgattgttgagcaatcaggaagaccagggttcagatcccagcatccacagaacaagccagagagcccatgaatgtcccacactctaaatctgatgccctcttctggccactgtaaacatacaccctcatgtgaaaacacacacacacacacacacacacacacacacacacacacacacacacttttcttttaagaaaaaaaatgggcaaagaagaggaaccaatagacatacagagacatcctgggttccagttaccaaccttccttcaagttcacagacattatcctctatctctgaatacagggattggcacaggctactctcttcactaggaacaccctctccttgatctcccccagtttaaatccatctacgtgaagctaatgtccccaagaaagcccttgaatgctcttgaaatgcagacccctctcctctccgagaaacatgctcacccactgagcattcttcctccatggcactgtgagtttctaagcacacgtttgtttctctgcttagcaggctgcttgtctcccttcctcacaaactacctctgttttactagccacacattcagtacagtacaatggttaaataaattagggaattgtaaaatcaaatagtttctctaggtttaaacggtgttatatggtgacaaaaacatgatatattgttaagtaccaaggcaggtggcaacataacatatatgtacaacttcggggagaaaaatatataataaaagtataaatcacggtctagccaaatccaggtgggatttgtccttttaattttgtttttatcaaacatgttctgaaacatcccaataagaaatacacacacggactcagggtgggggtgtggttaaatttcctctctaactgtcaagtccatgcgtggctgttgtaggaacctcggcggcttccttccacatactctcactgacccttctccactccctgggtttgagtctcgccctgagaaagggagcacagcccattccacacgacaacctccccctagccccactaaggcccatgtttcccaccttcagaaaatcagagccaaatgtctgagcttagactcctcgagacagtcaggacggaacgtgggtcatggttttcctcacagttgcactgcatcagaactgtcgtctgaaagaatacatgaggtcagcttgaccgcccaggaaaacggagagcaatcatgaaccagctaaagcctcaacagcaaaaatcatttttccgcaacttcaaagacacgggggtgctttatgagtggggcagaaacactgtgagatgagcaagagctagggaggcaggagcgagaggactgccacggagggctggaaatggaaccccttacctcaagggaggttctcaggcaattgaaagacaactgtggagagtgcccactgttccacagggtgagggtaggcaggtgatgcactttgctggggacctcctttcatgggaaccaaacctgcttgattgtctctaagggaacaagtctgcacacactgaaagagtcgctcacaaacggttcctctccgaggacaaagcttagcatgggctgggcaggttcagtccgtcccactcacagtcaaactccaatgccatcaatattctcacccacgccttcccctctccagaccccgtggcctaactttaaccaagatggaccatgccagaacatcaaaggctggtgtgtttttcctaaggataacttggccagcctaccatccaggaggctgcatgaactgagaggccagaaaactacttccttgaatcagtctggacagtttccaagttcagaatgtcttgccctctttctaacttccaacgctaggagttgggaagttcaaagcaaaaccgattctgtggggaacaacagttcagttcctgttggctgtcttcccccgctcctttgtaactcatctcttcctgctctcctcctctacagtgcattcctcttacttaagggaaacagaaagttaatatgagtaattggtcattaaatccacacagacacaactcggtgagaaaaccataattggacgctgtggtacgccaagcaggccacatgtggaagtggcactcgagaaacaatcatgaaatcgctgttcccacagtcaccgaggagctctaacacacagtcatccatgcagcccctgcactgcagagggctaccaggggccgctcctccacggctctcttgtcctatgctagtctggctcctcactaagctccaggcaaccccttggtttcccgtagtgtaggtggaggcagaacaggttcaaggacacaaacaagttcacgtgcctacttggagaaggagctgggatttgaacccaggaccctgactctcccacagcaccctgggggtatccatgcaagcttcccttgagatgactctaaatcctcacttataacccaccttcaccctttccatccttccttggaaagtgctggagggaacttttgcctccaaatcaaaacaaaacgctttagagccaactcacctcctaacataagctccgtgcctcacttcttaattacagttaatgaccccacttctgagcaccctacacaagacaccctgggctctggctgctgaactggtcatcacctctcttcccttccttgtaactcttcctaatgtacatgcctcagcaccctcagggattctttcccgcaagacctcctccttctcccctgcaagacctcgtccagggtacctgcctccatgaccctgctctagcctgtcctcctcatggatgcagccacccaggctgctcaccctcccgtctggacaatctagttagctaatcctttgacaatggagctaccgtggttaggagcatcctgctctctactctccaaacaccaacatgtacttgctcccaattcacctcccttggtctactcataactcaaatgtgtccccgaggcataaacccatcccccacactgagggccacagctttataccattgctccagcatggccctcatcccaaagcctcagcagctcaccaacaggccctggaggagtttgtaagaaggaattggtttttagagattaggaaataagaattcctatttatgcgactggagagatggctcaggggttaagagcactggctgctcttccagaggacctgggttcaattctcagcaccccatggcagctcacaactgtctgtaactccagttctaggagatgcgacagccaataccctcctctggtttcagtgggcactgcacagacatacaggcagacactaataataaaaaaatttcaaaagagaaatcctacctatgatttcttttttttttcttgagatttggggttaaccccctctgggctggggttgaaagtgcactgaggaaaaagaggcctatggaggaaaagcaaagccaaccctgctgacatggaggctcagctctcgtggctgggagcccctggaggaggtgaggcaaaccatgaacagccatgaactctagggacatatcttggactgggccccagcatccccgcctcctgattccttccaagtaactacatcccagcttccccatctgacaatggcaatgacagctggctctcaaggtctgatgagattaaatgagtgaatggagcaaataaattaaaccagcagccagctgttcccaaacatacttgagacagctacttccccttcactctaacaaaagaactgaggccatcgacttaaaaagaaagaaaggtttattttggtttatggtttcagaagtttggtccatgctcagctggctctcttgctttggggctgtggtgaggcacacatcacgctggctgaatatgtggaaaagtgaagctgcccacctcatggaagtcagaaaacaaaataagagaggagagagcacgggtgttcctcatcacgggcacatcagtgacctaacttcctcccctccacaggctagcaactaagcctgtcatatccaggccctttggagactctggtccacagcatgattagaacgagtctttccctgccagtgagcatgacccaggtttggcccagcagcactcctgctcatagtctgtgctctgaagctgccagtctatatccccgctgttgaaactcaaccaatttctcatggcctaacctcaaagtcacctctgtcacaaaccgttccctcttcaaacaagtcagagcccatctcttccactcctgaaccgtacaacacttagacaatgttcccagcatcttctgtctccattccttcctggataaatatcccaacccccagctggcctatctaagagacctggactctggcatactaccctcacacagtaaattctcagtgattccaacatgaacctagagaagaagtaaccaagcaactatttcatatttctgtgatgtcttgcctggcagaagcatttttaacacatgtgaagacaacctctactagacaagaggtggctgcttttgataacacatgctggtatccatggcccagactcatgggaggctggttctgggaccattccccacctagacagcaaaatctgtggatgctcaagttacttgtgaaaactagcatagtatttgcactcagcctatagatattctcctgtatactttaaatcatctctgcattactagaaatacctaatgcagttcaaatgctatgcaaatagctgtcacattgtgttgttcaggggctgctgacgagaaaaaaaaaacatatacaatgctcagttgagatacattttccccaaatattttcaatcaccaattgattgaatccataggtgtggcactcatggaaacagaggactaattataaatgaagcttccaaaactctcaccttatattgtaaggttttaatcaagacaagagtcgtttatccactttttaacatgaatcttaaatattgagttgatgttctcagttaatcattaacttcttcagtctcatcttgcttctgggttgactttgatgtttccaacagagcactgggaaaaaacgtctgctcttgagtgtgaaggacccagtacaaaggcttcctcattacacctgcccccaagtatccatgagtctggtcagagaaaccagtgtgcacaataccgtagcacaaataataaaaacccagagacatatattggggttcaagctgaagatcagaaaagcaaagcagccaaaccaccagagagttcttctctaccaaggctgggatgattctgtcttcaacatggctggaaactaattgccgaagactgaatgtcagctctgagaccccgttcctgtcttatatacctccccagtgctgggattaaagctgtgcaccaccactgcttggcgtctctggctgtggctaactttgcttttctgatctccaggtcagctttcttagatcataacaatctatcaccacaccataccatgggctgctacccatcccagcccacctgttgggcctctattccccagagtacaagaacgccactgagatctggagccaacaggtgtaaattccttaaatcacaatgtttaagctatttttttctgcaaaggcatccagaacccactaagattggcttagaatcaggcttttaaaactggacttgtacacaagcagccagtttgtccagtcaacggcctttggacatcatacactcaaaccctcccacccctccccccgcactatagaaaataactagccaggaagaaaactggccatctaggaagaggcatgatggctgcctccgtgggtgaaaaagagtcctgaagtccactcaacaagcagcttcccctctcactggctgtaaattcctacaacgaaccaattggggaggtgggactgggctcctgacatcccggctaatcatctcaaggtaaacttccttgtcttcttaaaagctgaggtggagaggatgtggagaaagggaacactcctccactgctggtgggagtgccaacttgtacagccactttggaaatctgtatggcgactcctcaggaaaatgggaatgagtctaccacaagatccagcaattccactcttaggcatatacccaaaagaagcacattcatacaacaaggacatctgttcaagcatgttcatagcagcactatttgtaatagccagacactggaagcagcctagatgcccctcaactgaagaatggatagagaaaatatggtaatttacacaatggagtactactcagcagaaaaaaacaatggaatcttgaaattcacaggcaaatggatggaactagaagaaaccatttctgagtgaggtaacccaatcacaaaaagacaaacatggtatgtactcactcatatgtggattttaaacatagagtaaaggattaccagactacaatccacactgccagagaagctagtaaacaaggaggacactaagagagacatacatggtcccctggagaaggggaaagggtcaagatcccctgagcaaattgggaaaatgggaagaggggggagggagctaggagaatgagaaggggagaagaggaggggtgcagaggacatgagggagcagaaaagttgagtcaggggaagaatagaagataacaagaatggagataccataatagagggagacattttaggtttacagagaaatcaggcactagggaaatgtctggagatctacaaagatgacaccagctaacaatctaagcaacagaggagaggctaccttaaatgtcctcccctgataatgagattgatgactgacttatatgccacccgatagccctcatccagcagctggtggaagtagaagcagacacccacaactaatcactgaactgaactggaatcaagatgcagagaaggatgagtgaagagcaaaggggtccagaccaggctggtgaaacccacagagacaactgacctgaacatcagggagctcttgctccccagactgatagctgggataccagcatgggactgatccagaccccaggaacatgggtttcagtgaggaaacctcggaaatctacaggacctcctgtagtagttcagtacttacccttagtataggtgtggaccttgggagcccaatccacatagagtaatactccctgagccaagacacccagggttgggggggagatatgtgataggtagggttttagttggaggggatggtaggggaggaaggaggggggagaagggaactgggattgtcatgtaaaacaatcttgtttctaattcaaataaaaaaaatctgcaacaacaacaacaaaaagccgaggtcacagcattgccttccaggcacacctggcagtaaatcctggctctgagtcactaacttcatccactgtgttgttggagatggagccaccagtggtacccttggcaatgcctggaagggccggtcacaccaaccagccttggaaggcagaagtatactggcattactcagcaaagcacaacacccatgtgtcctctagaaataggagggaccttccaaagccagaaaggggttgtgaatttgagggaaagcgtatttattggctcccacgcatgtggaacgcattatccaggcgatggggtcatatagacaagctgtccagccctcacagagttcctgttcctggccctaaaaggaagctcctcctgtgttgttcccctgttgtctgaaggaagaggaagaagccgcaattgagagaggtcatgaggatcccagtggcgactctaccactcactaagcagccatgatgccacaccccaccctgctctcaagactctcttcctcaccagcatcatccgactatggaggctttaatgcttcaaacccagaaagcctggactgagaggaccacagatgtccatggtagagactggttaggaaaacaaacaaacaacaacaacaacaacaaaaaaaaaaaccaggcaaatctaactttcttcgtattcaatgaaaccatcagtttatagcactgggaacggcagcataatcatagttataaacctgtaatgcttcaatatgtcatcacagcatgctgaattacagagatagtggagacaaaagtgtcgcttttgcctgtttattggaatatttctcatactgtccacattttcaaagaaaaaagtatgaagatgaatattttccactaggtgttttctatcaactcaggattcaggaacctgcccatcattcatctccgactcccgcaccctcctctgacagtgccttgcacacaggctcaggaaggtttgtagactgctgcacctgttctagacctacctactccattaatgtttacagagacgctgcttgatagcagaggaggtttctgaactgcagttctcaccactgccacggtgggtttctcaccatctgccttctggctggaccctcttctcccaggagagcccaaacctatagtacgctaaaggtagttaagtaccaaacctctagagaaatcacttctcggtgccttaaagaatgttcccttctcagcatgatgtctctctctgaaccgtggccacactttccctctaaacggtttgttctaagctatggaattttaaagcccccttttcactaatgagcccacaggaggtctactgaaagctacaaaccgaccctgttcaaagaggggcgcacactgatgttcccacctggccatgatggccttagggctggcttacagcctgcaaagactggtctgtggtgaggctatgagtgtgtggggtgtgccagcagagaggtgcaggcaggagagctagaccacactggactcaaccaccattccctccaactgtcttcatgaggccctttgctgacacagggcggccagtctcacccaggtaccttacagagcactgcatgcaacctagtcacaaaaatcactcagatgcccccttttctcttaagttgtaggtatcacaggggcaggggagggagcagaagaggagtaagaggggaagccggagaaaacacaagggagtgttttgactagaaacaagaaaatgcctcacagaagataaatgcaaaatgacttaaaaatccaatgagaggcggtctcgtgctactctagctattaaccatcacttctcctcaggctgagtcctcgtgataattcaatatttacctgacctaaaccaggggtgggcccccttcgtggcctggggagccacttgcaattgactttcagtggctagcagctgtaatcaaataatgtgagtgtctagcagtaggttgattgggttaaagcaaacgctgtggccctgtaatttaggaaactgccaatttgagcttccacaccttctctggacccaacagtcgtcagtgttcacatgcagagctgatctcgggaaatgtttgatgaatgacttagtgacgcatggacaggtcagtgaatgtcacatagcttccacccacctccacccccacatactcacacactcaaacacacacactcacacactcacacacacacacactcactcacactcactcacacacactcacacacactcactcacacacacactcacacacactcacactcacacactctcacacacacactcacacactcacacacacactctcacacactcacacacactcacacactcactcacacacacacactctcacacacactcacacactcacacacactcactcacacacactcacacactctctcacacactcacacactcacacactctcacacacacactcacacactcactcacacacactctcacacacacacactcacacacacactcacacacactcacacacacacactcacacacactcacactctcacacacacactctcacacacacacacactcactcacacacactctctcacacacaaacacacacacactcacacacacacagcttcaggtgactacacctctgttcatattgaccctccttccccgagtaactactgcacttctgtcaggacaaagctggcaccgtctatctcccggaagctatcctggattcccctctgttgggatgagagccatcatagtggctttctaacagaattaatattttccttccttgggagtctgctcagaagtgaaacacatcctctgaattcagagtgagtgtctcagccttcacttttggccacgtctggagatagaacccttacaaaacaattaaggttaaatgaaaccataaaatcaggacccaaacctgacaggactgggtccttgttagatggggcaccgagtgaggtttctctcctgcactccctgcactgccctgcacacactccagggaaaggccatggtgagaggtagctgtctacaagctgagaagggaacccttacctaaacttccagcctccagaatggcaagacaataaatgcctgttgtttccactaagcagacgtcagtagctcgacaatgattgcctgtgctggtttagtatagcacacagaaacgagtcccttaaggaccagtgtttatcttgtttgtagtattagtctcagtacctactgcagtccttacatatagtaaatgctcagtaagttcttgttgaggaaatggaggaacagatgaagattgaaaaactaaaaacaaaaacaaaaaacctctcatttttgcactcttgtgaacacaacccatgcttctaccctcatcaacataaacaaaaactcaatgacccacagggctgtcactccaatcgagtagtgaaactgcagtccagccgagcatcaaccctcttaccgttctttctacccatcccggtatctgttgttgctgcctgacttagacgttggaaatgagactgggaagggatgtttctgcagataaggttcttgctgtacaagatggtgacctgagttcacataaggtggaaaaggagaactacctccacaaatgcatcttctattccacgtgtgtgccatggcatgcatgctccccgccacacacacacacacacacacacacacacacacacacacacacaaataatattttaagtgtttctttctgtttgattcttcctgttttattcctacagcagcaagctctgcagagccctttcaggctattggaatgccagtgtcgtaccttgagagataaaccatagcaaagtcaagtgcctgccctccaggaacacgtaacccctctgtggagcctgacagcagggcttgctctcccagtcattcccgtgtgtgttggtccgtaggatacattaaaattatatggtccaggaaaatgaagacaaaccagttacagatctacctctaaagagcttaatgatgaaggtaacgaagccattacttcaactactacgtcacaggcactcttccgggcaccttctatattaagtcatttaaccttcattaacagtgatgtggctgggtgctaccatttcatgttatagataaagagctgagacagagacaagtcagttgctctgtgaagcaattaaacagttgagcggggattctaccttatggtggaagaatgtctgccctcagggctcttgttcttagtgactttttcaagctgcctgtcttagtcacttttctatggctgtgataagacaccatgaccaaggcaacttatagagaaaagagtttattggggcttacagtttcagagggttagagtccatgaccatcatgacaggggccatggaatcaggcatgcatggcactagaacagtagctaagagatcacatcttgaggtacagccaggaggcagagaaaactaactcaaaatggcaccgtctttaaaaaccacaaagccccaccccgtgacacacctcctccaactaggccacacctcctaatcctcttcaaacagttccacgggttgagaacaaagtattcaaatataagtgtctatagaagccgttctcatccaaatcaccccactgcccacagaagatgaggaccttgcttcaacctcatggttgtgaccatcttactttaagaaaactgatttactttgacccacagacagtactgggggcaatcatttcaatgtaaattcaaggagcaatagaaatgggcttggtacaatcttgtgtattgccatggaagttagctcatgccgtatcactgagaacatgacccagtttagcaacattgacacagcaggcaccacaggaaatgccaagtattagaaggccaaggcatgtaggaggtgagaggcctgcaaaccatggagagcagcaaaggcagaaactagtagctggctcagcttttgattagagtccctggtacccacgctgcatggaaggccctgagaaaggccaattttaacagcggcagcaacaacaggctcagaggaacctgcccttgagtgtggctacagccaaggtgcaaaggcagctgcagtggagacagggaagtctctggagctcctgaatatcaaggtcttccttcagctggagcacaatgagggcatgagctctgggtactcatttccatgtaaatgacaacagcagcagcagatttccagcaaagccattctcaaggggatggataaatgctcaataccacataaaaccacacaaggccctctgctagcaattcaaagcctaaggatcagcttgtatttgaaagagccctttctcaaatcagaccggagcattctgtgagccctgtcatggtcaaggtctgaggggcagggcagaagctacagcaaggtaccctcagctgtcctgaaggactttgagatcaaaatgcagaagctttcttgtcattcatgagggtctaggaatcccacgattggccaccagcctacagatggcccatagctacatcccatttgccaaactacaaggaagaatcccagcacttacagacagacagcatgtagctggaggtgagagaaggcatttttgaacaaatgtaagtacagggactctgtggtgtgtccatcctgcagccgacaggctgcgttcaactgaggatggccatgaatgtaacccaacacaaaatcacagacttgccattatgagatatttttacagttgttatttgcaccaaaatccacctggttcatgagtttgaactttgccaatgacatcatgtcgaactatcagacagttgggccggtttgtgttagatacaaaggcaaaattgcagctcatcccagcatccgagctaagtctgcagaggctgaaccctatggcaccccacaagcttccacaacagaaggaccatgctggctaacagggaggcggagcaagagacacacagagtaagtcccttcctcaggaacctttgtagcacctgtgatgacttgcttgcctacctcacatgcttagtttctctttttctggggcttctgtcagcacacaaaaaaagccgactgggcttgggccaacagctattgagaaattcctttagcagtacaaggaccttctccatctcgagatgtgactgttctctgaacgcgccggcagcagggacccagcacagactggcacatcccattttgcagcaaaacagctcctccagctgcctcacctcatgtccacacaaaaatgagctgccattggcatcaggattcactgggattttctattatacagagcatccttgctggcctttcccatttgcaatggacaggtgttccttccagacatccaggcagtcatcactgtttcatgttcattgaaagccttcgggcactgttccctcacaccttcttcccgtcccacaaccctgcacctgatgcttacaccctcgccagggtccttggtttgcacagaaagacacaaaagcacaggaagctaacgtgacttccttcaaaggcagcaggatggtgacggggtgtgggggtgacagagggcttagtctttaacagcccacctctgcagagtagcagacagctggctgtgtccctggagaactcaaggacgggggtcccagcaggatgcgcaggaaggactgccatccatccgtagcacagcgcccacagaaaacctcagacctgggaggaagggatggctacaagggcggggcgccctgccaccgtcctacactcaggtacacagggagggaagcatctgaagatgctcacagacacatggtggccctgatgaacctaaccctcttagccttctcctcacaccaaagactggaagttgttctgagtgctcgtttgcgctcaaacatctcctcgtcgattctccggtccctttattattttaagttgcaaccaaagcctcctaagaagtgacttacaggaggaagcaattattttgactccatgtcaaaataattgtgtgtgtgtgtgtgtgtgtgtgtgtgtgtgtgtgtgtgtgtgtgtgtgtgtgtgtgttggggcgggagtggggtggggtatgtggctgggattgctcacctccttacatctctgggaaatgagacgaacagacagaaagagacgaacagaacagaaaggaagtggggcttcactataatcccccaggccccgccctccagtgactcacttcctccaggtagtttccacttcccaaaggctccacaagctcacacagcagcaccaggctaggagccgtgggtgtgctggttagttttctatcaaccctacaccacctagagttacctgaaaggaaggaacctcacttgagaaaatgccttcatccagcagttagacatttcttatttaggggttgacgggggagggcccagcccttgtgggcagtgtcctccctgggctggtggtcctgggttctttaagagaacaggttaaacagcccttgggagcaagccagtaagcagcaccccacacacgccatggcctctgcatcagcttctgcctccaggttcctatcctcactgcttttgatggtgaactgtttctatgggactgtgagtgaaataaaccctttcctcccccatggcctttggtcatggagtttcatcccagcaatagtgaccctaactaagacaacatgaaacttgtaggggacatttatatgcacagcataacagaggctcccagccatggcctttctccctcctagctcagctttctgcctgattgccacaggcacccagatttgggacactaaagcattattctaataataacataaaagtatcccgataataacataaacacaagataaaagctcccaaacaagagggagtattcaataacctgaatcaagtgtatttggttttgcttttaaattcttattggtatcaatattgatgagctagctgcacagctcctcagcctccaagctggctgttcctcccagcattacaccccgacctctctctcctcccacactcccttcctgggaaagcccagcccctcccacagtccccttgaagcagatgacacacacacacacacacacacacacacacacaccttcatccccagtcctaacgtctctcctgagcctcgaactaagtcctcaactgtcggatggacagacagtgaccaaatgcagggggagggcaatgcagcctcctcaccactgggaggacaaggttgagagagtacgggctcagcagggtctcttcctgtcagggggcagctctgggtgtgtcccttcctgtgcacctgagtgataatggcagggcacaccctcctggccgccacccctcatcagtggcccctccaacggagtgctgccaggctcgggccctcttctgccaacctcacatctgctgtccgcctcagttaattgtgcgtctgcatctttccccctgcttagctctctgtagttgaagccctcagcatgtccctcctgagtcaacatacttgtttcctaactgccccccagagaatatacatttgcagagggcagggctctgtttccagctgtgtctgccacctagtcttggatagatgcatgataaatatttaatgagcaaaaggtttctctacatctctatcttgcatgctgctaaaaaatccatttctaaaacaaaatgaaacagagcatgccatgcccccggaggcctatgtttgaaggttcccacccaaatccctgagtgtggtggtcagccaggcacatggctctaacctaccctcttgtgtgcactttatcaaggccaccctgagccttgccttcagcacatatcctttctcctctgtgtgttcacactgttctcccgtcttaaaaaaaaaaaaaaaaaaccatcatcttccaacaccttctttgcctggaaattattgtattgatcaagactgggcaccaaaggctttgtgtttcatgagcctctaccacaacccccaccccagccctgaatcttggagataagttaccagtgtgaacccactgtacagcattatggtagttagatccatggggccactgagaccaagacttgggagctatccagtgaatacccacaccagccatctatctaccttgacctgtgctgctggacatgtgagtgttactccatatccctcacaggcaaagacgactctctggcaggctcactcccagggcagtaaatgtggcaatcgttcattgtcagtttgttctggatgatgctggcacctcagggagttatgacacccaccccaccccacaccacacacacagttggttttcacagaacctagggaagtaactcctttcacagagactgaagccaaggcagcaagtaggttaccatccctcccccgagcagtaacagcagcaatgagaactggttactctctacaacactgcatctccccagggtttgctcccagaatccacagcacacctaccaagtcagtattaaaagtaagtgccttccatctacaaggtaatggtataaagaggatgacaatagaaaacaaaaaacaaaacaagatgtgccctctacttctagtccaaagcagatgaggaggtgggtggaacctgggcaagacttttaaatggtcacacagtaattcataactgaattcttcttaaacagataaactaaaagttccttaaagattgtttccatatttaaatataactcaatgcaacttaattcctctatttaaataggcttaaatcctatttaaacagaggaagcctccatcagctactgagtgcatgctgttatattataacctaaatttgcaggagcctcctacacctccccaaaaccagcgtgtgtgcctataaatgtgtatatggtgactaggggttggtcagacatcttcctctatatttatctatcttacttttaaaactaatttatttactgttttttatgcactggtgttttgcctgtgcaattgtctgtgggagggtgtcatgtcccctccagctggagttacagacagttccgtgctgccatgtgggtgctggggattgaacctgggtccttttgaagagcagtcagtgttcttaaccactgagccgtctctccagtcccataccttgttcttttttagattattttatttgactttaatgtgtatgagtgttttgcttacagacatgcactacatgcatcagattcccaggagcaagagttacagacatttgtcatgagctgtgaaataggtgctgggaactgaactcaggtcctctgtaagagcaacaagcactcttaactgctaaaccgttctccaccccaccacacagtaaatgtaaaatttactgaattttacattcagtaaaattcctttactgaattcagagctcaccaatggctacactggccagcaagccctggcatcctcctgtctccacctgcacagcactgggattgtctgcagtcaagcctggctttttatgcgagtgctgggctgctgagtgcaggcccttgtgtctgtgggttagattgggttattaagacctcatgttagttaacagaaaccttggaaaaggataactgaaaatctctcacaagattaagactatccaatttccataaaaccagtagatcctgttatccatctcatggttaaaaaacaaaaagcaaagagtcaatctctcagtataagagcttaaagcccagaaactcctacattctttactgaaaacttgaatttggtaactagctagatgagttccaaagttgtggaaataccagcattaaatccactatgagaacacattttatgtctttcttaaaagaacatcttcgccttactggctcactcaatccaaccacacatctctttcataaatgcaaccaggctgaagaagtaaggtggttttgtattctgttagaaaaataaggatatagcgtgtgtgtgtgaccttccttgtccagctttctgccacactgatgattctagaagataaaagtcaaccatttcaaacagaagcaagagatagtcaagcaaggccttcttttccaaaaagccctgcccttccccttcctcctttgaaaagctccacttattgaacaatgatgaagtgaccactgaccaagcttacttggctctgcgattcttcccacttctttgcacccaaatccattcctagagactcaggacacgttcaactccacagacagggccacaaaagtgcctagccggtggaggctgcaggaacttctgacatatccacagtggaggcagtggaggctcattcactctgtgctgccaggtttaatgtcactgctaaataatgtcaaggatttgttttcatttgacttctctgatattcccaatttaccttgcttaagattaataaagcaattacaatactccaattaagaagctatttcaaaatgtactttcaattccagtttgtgagcaactcacttaattatttctatttgtttttcttcttgagtgtgtaacttctcttagagcagttcagacatgttttttcgtcaagatgaaggaaaaccaggccaagttcctccccaaattcagcctcaagttcatctatccagcagaagatatgttcaagtgactctcagatcctgtgaaccttcacagctcattctttatccaatctaacatttccagggataaatgtcccctagggttcaaaggtcctagttgccactgtctctctcctcagtgctcagattacagatgtgtgcctctgtgtcttgctccctaatatggctttctctgaccatttgtaggcactaggggagcaacctcactgaggatgcttcttaaataaagatataaaagatgggagagatagtttaaaaaaaagaaagaaaaagaaatctcctcttggtgcattcaccaatcacaggtagtgacacatacaaaatctgtttgcattgcttttaacactctaagacatgctagctgagggatcattaaacacttgtccaaagtgcatggaaactgcaaggaaaactgccacagccctagaaagggttggtgagcatgcatgtcacttgtcccagagaccaggcatctctctgttcagggcaggtgagagtcaaggaacattccattctgacctgggagacgggtttcttaggtttctggtctcttacaattatctactcagagtccagggctcaggcaccatggcctctacttcatcccagattatggaattttcttgtcaattcaccagtatgtttgtcccagagttcccgtatgtcacggtagagaaggccaatttttaaactattcaataatttcagcttaaatggacacttttgggtgaactaccataaaaatagggttggtggatgtattggagattgaaattgtcatgtcatggcatactaaagaaaggccataatgaaaatgacaagtggcctaatcttgtcacccctcaggtggttcttctattgcataaggataaataatggcatacaccatgcacgttcaccatgaggaattaaatgaggttacatatgtatgggaataggcgttggcacacaaagcatgctctgggcatctgcaatcagtgttactgatgatttggaaatgtttatcactcgcttggatttcaaccaattcaatgtttcatcccatcttttctcagtcttccgtggtcaatgatatttgaacagtgacttcctgtgaaaatagaccaataagtagagaggtggtacactggatgcacgagactaagcatcttttgtatctgccatggatgttgctgtgtgtcttggcaaatggagactgtttgtaaataagctaaaaggcttgctcatttggccctttctttccttcagttcagaagcaatgatcctggtgacctatttagatgtaccattaccctgtgtggttatttcaattatcaaacaccgaataggcttgcaaaatcaggaaaggataaatagaagcaatctgaacttttttaaaatcacttttctcatcagtatcaataaataacacgagattttagattgaactaaaaatctatattaagaaaattttgtgaaagtcatttgcatttcaacttttgagaagttttatttgtatatttccttgggagcaaaaactaatccctttatatgtatatttcagggcatgaaatagagccaaacgatggaacagagaaatggggaaggcagctaagagtttagaacccagcaattcctaaaagttccccttattgtgagtatacattctaagaatccctcaggatgcttaaaatcgcagacagtagcaaatcccacttactatacttcattttatcctatacatatacacctacgataaagttaaatttatatgttaggcatagtgaggaattaacaatgccaaacagaacatttataacatttataacatgtgctgtaatacaggtgttctggatattgtcctaaatatccttctgtattatatactggacaaaaggattaatttctgttccatgcaggaagaactgggcaggttggtgaaagacatccccatgctactcaaaatgccactcctactttattgcttattctagactttcccgttgaatattttcaagccatggtaataatcagcaacagaaatcatggaaacaaaactgaagacaagggctgactgctttaatagagagcttattattctcaggccatggtgataactggcaactgaaatccatgcagccacttaagggcagaagctgaacctgaaccctgttcatcctggaaagaatgcagagtctttgttctcatttgaaggccttttagaagctctggaaatatatcccagacaccaagaacagaatagcacggccacttttcttcattcctaatcagtatctactgggttaagatcttcatctaacccattactctagggaattaaagaagtactgggtccctctgacttgcctcttctcctctggcttgtgaggtgcgagatttgctacttgctacaggaaatccttctgtacccccaaagttttcagatctcacctgtcaataagctgtttccatgctgcataaattactacaggctttgttgaggaaataagcgctggagttttgggagttgggactttgttgactaggttcagtttgaaaccatggatttcagacacagccgtgcaggaaaagcttctacttgaccacacataaaacttttctcaataaaacgccaagacacccacacctaaaaaccagttgaccactcatttgttcctatctgctggcacacagatacagcctcatgacccaaaggatacctcacccccatggggctaaattcagagagaactgtaactcgattgtgctgacttggaagcagggaagtgggaagcatagcccacctgacagtacactcctgctccaaactcttccctgggccccactgacgtgagacattcagcattctcccaagacccttaagaaaagactccaagttatctgtccttccacatattggctcactgtggtcgttgagtctgcattcactagactattctccattctctggtgagtccaatcatgtgataagtccaatcatgtgaccatctccacatctctgtacaagatatctccgccacccttcccaccctaagtgtctctctgtctctgatttctcctctgaccttccccagacaacttccaactgaacggggcctccacttttcataactcgcccacccacggtgcgtgttttctaagtggtgaagcaggaattgaggtgactttttttcttgcttccaaccaacactgacggagcatttggccatgactcagatgctgcactggtgcctaaaacctaaaaatgtgtcagtcaagatccttgccctcagtgggcttacaatgttataaagccttgcttcttagagtaatgggagcccaggagagtgaaggatttactgactggagaaacatgtgatagaacttaggttataccttaaaattgttcattgggagagtaagggaggttctcttagtttaaaagaacagtgtgagcaacagcactcattgtttattgaataaatagatcaaagaggccccaaactatagcatggtcttagctactacttctccaggacttctacaattactgagtgtctgtggcatttccatccctgatatcagctccttaagatttgtaaaaatcgctgggtgttggtagcgatacctttaatcccagcactcgggaggcacaggcagatgatctctgtgagttcgaggccagcctgatcgagtgccaggataggctccaaagctacacagagaaaccctgtctccaaaagcaaaacaaaacaaaacaaaaaaaagatttgtaaaaatcctccttattttatagataaggaggctgagacaaccccccactcctcgagtgcgccacaccaaaaatcttaaagctagcaagcatcagtgcccaccccaagttcccagtaatagaagggggttcatcctcgaggggtaatttgtagagcgaagtctaggtcctcttcctgtacatccgtgtggaccactctcatcatccctcagaacccaggaggcttctgggaaagtagacagaggcaaaagaagaaaagcaactgaagccacagtccacaaggattttggacacagcggggtcctgtatccccccataagcctggtaggagtccactcgggatcatcatttttggagactccaaatgaggacccttctacccagctgataaaaggcagcccggagagagccacccaaagtcaccacaagctaaaccaggcttataaaaagctctcctagggctcaaagagttgaattggatctttggcttcccaggacaaagcatttcggttttgacggagttcttttctctcccgtcttttgtctggtcattttctcaatttctccctctctagctcaggctttttctgtgatacttatattgggccaatgcttcctccccgctcctagctcagactattatatctagctattgtggtgttccttttccactgaaagcaatcaaaaatgaaaatccccatttcagaagagcgtctattaaatatgcaccttttgtgggttaaaaaaaggagagagctcggtgaggacagacttcagttgtgtttcacctacagatcagatggtaggtgagacttctgcccagtagcaagtcatttacatccggtaatcaagaaggaggtcagggagtctggagttagaagcaacttactttaaggaatagcttggtctaaagcactactaatcaaactgtgatctttggaccagccacaaaggcttcacccgggagcttattgaatatagatcccgggggctgaagagatgctccaaagttaaaggcacctgcctctattctagaggacctgagttcagatcccagcacccctgttgtactgctcatgactgcctgtacctcaagctccaggaaatccaaagctcccttctggcctcctagggaaccagcacaaacgtgggggctaaacatacacataaacaaaagtaataaattaaagaacaaaaaaatgcaggctctcatggaccactcaaagccaatggagccaggatctgtcttttaacaagaatccaggtgatttgcccacacgtgttctggagcagagttctggaggaacggtagatttgcctttattgtcaacctggagactatgcagatgtcttttctaagaaagtaaacctgtcttgccaatgtcttaggctgtcccccaccgtcctttcctgcccacactgtggattcatacagaagtcctacaaatcatcagcagcctcaaaaagagttgcaggtgagatcaggctggtgagcagccattctgcagcaggtgctcccttaaaggaaagggctctgacgctaaaggatgacagggaacccctactcccaccatttccaagattccagaaagggatggaaaaagacacccctgtacaaactacaaaggtaactcatgagaccaaagggtcttattaaaaatccgggaatgccctgaaaacaatggatgaaaccaagagcatagccttcaagttcagcccatgctcagacctcacacggcagtggagacagatgtagatggtctctgattagcatttgtcatctatgtgggggatataggccaggaagatggagagtcatggggacctggctggaaggaccaggagctagaactgaaagcccagagagaggaaaagcccggggcctattcagtggtggcctgcctactgattcccatctgctcatgaggcagagctagtatccagagaggggaaagccctggaaggccacagagacgtggtctggaatcaaaattgaccttgtcctctgtgaagaggacgcctgcctcagatgtttctagtgaaaatagaatagcagcacaaaaagttattccttggaagaaatgaaataaaaacaacaacccacccaccccatccaaagccaaagccagagttttctccctgattctgactccttgcacaccgcaataaacacttttgtgcccatgtggaatgctgaattgctgattgctctgtgtaaggcctatgttgccattatcctcccccaggtttgctaaattttcacccacttattcgctccattttcaccttcaaagtctctgaaacagcaacattttccaacatggaaatggttcatttatgccaagcaatacttgtttgtcatctaatgacaatctgcttaagcatccacagaatcggttatgagaacacaaacctgtccttcacgtacccacatcagcaagctctcaaggaatatttggaacagacaggaatgatggacagtggtgcacatgggagaaagagatacttaagcagggaaactcagacgggagctcatctgtgctcctctgccacaacccaaagacagcccgctccctaggaatcaagtgcctcgcctccctacagagactggggctatccatttatctcggttaacttccactttttgacttgatcacccctgtgaaccagaactagctaagcaatcttccagaaacccacctgaagctctgcaacccttccccacccccaacagccactgacgtaactcaacacaccacctccaagaaagagaaagttaactttcaaataaacctgtccttcaaccagcctgaccatgtttccagacccctcatatccttaaaggtggttattctagcgttgcccaaatccagaagccaaaacctgaactgtctgaagagggcaaagatcaaaggtcaaaggtccacaaatatagcgccttttccctctttctttaccctccttcttctatccctcttttttctttcttggccaaaatgggaataatggaccaggctttttgtccttccttcagaaaagcccaactggtcagctggcgggtgtgcaaacctgcaccggttccacagaattttccgtgaactccaggggttttgcagaaggctgggacacaagaattctgtttctcgggcacccctaaagtctgtatgtatgcaggaggtgcagtcctgtcctgtcagcaaagggtcccctccctgctggaccgtccaaggctctcccatcacagagggtcggtcacactcaccacccgtgagctgtgctgggccaaagcacagcgccagttgaaaccacaggatcacggccaagagtctctggggggactgaggctgctgttgctgcagctgctgctctagaaatccatctccattgctcgggttcattccatgatacatctttcatccacagagggcatccagcttgcaagagtctgcaaccaggagcggaacacgacaataccccggggttgcccgggctctggggccgcgctctccctcctccgccccggggacccggcgcctgggctttgcgggctccatcccggttcgcccctgcgcagcacccccccccgccccctttcccacggcgagatcctccccgccaccccccatgcagggtccagagagtagcagccaccatgggatactgcgcgtgcgggagggatggaggaggggagagaggacaggggtagtgcacactggctctgcgctggtccccgggattcagcggttgtgatcatgacaggaaagtctaaagccttctagcatcaagcggctgagaaaacacttttccccgggcctgtacatttcactcgcgggaatctcacaatgtgccccctgctgcccccggctacttctctgcttttccagggatagggagggtcctattgccccagtcccctatgagatctgagctgtggtttttatttttaaaattcctcccttaggggtgctgagcccggagccaactcgcccaggccggcctgcgcgcgccaccccgggcaggcgagccccttccgggctccggctcttacctgtgggtctcatgcatgcagcttctttccctcctccgcctcctccccccgccagtctaacccgcatctgtgcgcgacctctgctgccgccgctgcgcgagcgagcgagcgagcgagacgaaagcctcggcggctgccgggctgcaccgcccccgcccgtcccgccgcgcgctccctccccgggctcccccgagcggacacgggggagggggcgggggtgacgaggaccaaggcggccgggatgcgcgcccccgggaggcgctcgcgtccccgctacctgagctcgggagcgcgcggcggcggcgcggggagggggagggctggggcgcaggcctgcacgcgccccgctggatcccagccagcagcaggggtgggggtgaggggatggcgaggacggaggaggatgccacggccaatgggaagccggcgcgcctgcacctgtcgggcacgagtctccaggcggcggcgcacgcgcgcgcgcgcgcgcgcacacacacggacacgcttgtgcacgcacacatgctcaggcacacgcacgcgcgcacacgcccaggtctgcaccgcgatccttcaccggtggcctctggtgccatgtgcgcatcaccacaggctgcgatggtgaaggtggccttaggcgagggatcccacccaggagcatcaccgacgacagggttagcttgaatggggccgagtgagctcgttcctggctaaaacctcaagttcctggggaccccagagcacctccgcaggctctgcgcttctgctagagcccagaggacgactcgaggaggctgggtctctgtgccccgtcccttgcacccttggcatttttcctcttggctgccttggagatgaatgcatccctcggagctttctcttgagagtctctcccccagggaggcgaatgacaggcggtgaggcgatgggtgccaatgcagaaagctgggtatcacctgaaggggaggcttatggcccatgggtaagaacccaaaggaatcgggggtccccaggaaacagagatcccctggtcagcggtggtccctttctggtgtcttgtaagctcagcctgctgtgatctctgctctcccaacccattcctgcctttgctgttccccagcaggcctccctctgggggttgggctcctagggcccaggttccagccttggtgattaaggggtgtgtcctaatgaggtggtgcccgcaggcagtattttgagccactagcactccgttattctgtagcaatttgtggatatgaaaaaccatgtttctgatacggccaccaaatcatcccgtccttctatcgactttcccaaactctccaatgctgaaggtagttgggaaattacagcttttactgtgtcggctcttactgagagtaattttaacaaattcttgaaggagaaattagcttttagtagataaatccggttcaattttttttttcgatttgtaaaattgagatgtcggctttgcccagggtaactttaacattttttggctatcacaatgtattcctgctaaggcgtgtgctttgaggccccaaagctttacttgggtatttttccatgtttccaaggtcccgaaattgttcgctgcaaattgaatatttattccagtttattctcagtaaaatgtctacccccttttaaatagctgtcaaatccaaagggctcaaaactgtttgttgagcgcgcaacaaacatgtctgaagctgcaacaatcggtttatacagaatgccagggtcaacatgaacattcaaattcagcaggcctagaggtaggatctatgcttacctctccttttggacgtagtggtgtccaactgggtctacaactgagtagtagagcatttgcctagctctggttcgaggctcagggctccaccccgagtaccctaacagctaaatcatctatgaacaaggtcatttagcctcacccagtacttgaggcagcctgttgtatttgcctataacccagaaaagccttccttatgtgggactgctctactttggtttctactgctgtgataaaacactgaccaaaagcaacttggggtatgtgtgaaaggtttacttggcttacaagctgcaatccatcactgaggacagccagggcaggaagctgaagcagagaccatggaggaatgctgctggcctactcacttttacttcccagggcttgctcagctggttcacttagtacagctcaggctcacctgcccaggaaggacacccacccgcacccggacacacatacagtaggctgggccctcctgcatcactcagcaattaagaaaatgtccccacagatatggccacatggaggcaattactcagctcagagtccctcttcttggatacgtatgtctaggtttatgtcaagttggcaaaagctatgacagaaccgagatctacccttcctgactcttcacccatggttctgcctctccattccgggcccccacagctaagccaaattctcctttttgaagacaacctttcaagggctggagagatgactcggtggataagtacagatgatgcgggttcaattcccagcgtccacatggtggctcacaaccatctgtaactccagttacagtgcatccaatgtccttaccctcttcttatctccacagacatcagccatgcaggtggtgaacacacatacaatcaggcaacaacatttatgaatataaatttaataaaacgagagacagcatttcatccagttggaggtagcatcatgctcccttgcctttcccttctgtgggttatatgtagtcacttcccgtgatgtgacaattcccaggctcttcactagtttgtgggcaaactagaggccgcgttctcaccagtggccaccgagctccagccctgagagtttggaaaaggaggtgtatgatccctctgcactctcacccatgcaggacaggactgggcttcccaccattctcattcacacagtggaagcttttggagggtgactacagcacagcattttgtcagtttcccatattatcttatttttttccatagttgccataaaatgtcatggtcttggtggtatacacaataggaattcatttttcccaattttgggtgctggaaatccaaagcaaaagtgttgtgggtgcagatgacagcctcctgtgtgttcatgtgggcgttcctctgtggtgtctaggacagtcctaatggcctcatttaaacttaattgccactttaaaggccttgtctccaaaaaccagtcatattcagactctaaaaaataagccatcttgaatataattggatatacactttctccagaaaaggaaatgaggatagatggagtgcaggagatagcatgactcacttcctaccaagtgatggaaaacttacctcctctgtctttctcactcctaccggagttcactaccaaactgtagaaaaaagcaaaacctcccgacttactctatagatttcttggagtattagacagacccagaagtagttgtgaaattcaggaaatcctctgctttctgctactataactaaatatcacaaccaggtaatttataaatactggaggctaagtagttcaagaacaagaaacacttctggtaagggctttcttgctacattatagcatgacagaagataccatgtggccagaaagaaataggagggatggggagggggagggagagagaaaaagagagaaggagggagggagggagggagggaccacagaaagactgacaacacagaaaatggctgatacccatccttttttcagaaacccattccttggtaagcaactcactccaggagtagcataagtccattcatcaagatgaagccctcaggacccaaacaactcccatcaggctttgcttcacatgcagtggcacttgggggctaagtttccaacatgtggaccctgaggcaaacactgtttgaaaactaaagactgaagccaagcaatgagcttttctcctttccctgggtttcttgaattatgagcacccagaaaatgtagagtcaactcactgaccctggaacatgcagaaagcgaggccaggatcacactgagctttgtttccagaagatctaaagttctccaaagctgtggtccatccagtacaggagccttgcaggttcagcccagtgtgtgagcagcaagtttccggggcttcggagatagataaactagctcacgtaggcactcacatcacatgggcctcctccatccacacaaagtgtactcggtgggtgggcacatggcatatttcagtcattacattaggtacagaaactacaaagacatgaaatgttcaacaagtttacagtctatgaggaagttaagaaataagtctactattacagtagtaaaggcaaagattgggaggtacaaatgagatggtgccctggagcaggatcctggagtacaaatagctgtgtgcctgtgtgggtttgaggagaataaaagggatcaaacagtccaacaagtttcctgggcagatagagcagcctaggcagtgaccaggagggacgggttagggatggagaccaaagatagagtttataacgcaagcagggaaatgccaaatggcacagcgtcctagacgcatctaaggtcattccaggaggagcctggaaagccatgcaggcaagtttaactttggtctgaacacaaagagacaagactaggaagatgtggacatgttgtacagagctctgcactcctccttggctcacagacacaaggaaaggtgctgaggatgactgatgaattggagaatgccaattaaagaaatacctgatgtccacaccaccctctgtggaccacagatacatgtgtgagcatatcaaatgtttgatgcagatgcaggggaaatgagcatctgcattctacctctaagattgcaaacgccccatggattagccacatctatcatctgactctttggtatctgtctgggggccttgctaccctggatgggtcaccctccccagaattagccaatgtgtagagacagtaaaccagagtctgcctatccacccctcctctgggagtcctcacactcaagatcagtatttcccccaggggccaggcgctagacaatgaggggcagcccctgcatccttgagttgaaatcactcaccctggtcagtcttatgtcctacctattgcaaccacagcaaaggttcctggccatgtccccaatttcacctacctccaatcagctctaatgctctccacccccacgcgtttctatggtgtgcatgcaagggatgtgtggatgcaatcaaatgccttctgcaaaaccattttcatcttagttattcctaataactcctagttactcctcatcctgccagcactgtggaggaggggaatctgactctacttttcactagtcactgtccattccaaatgccacctgtgcattcacctaagacactttacatgatggtgaaggtggtgccagttcttgcttctacattccaaagcttgcttgcaacagattgggttggaagggatggggttttggttcagtggttgaagtttctagcatgtacatgtacatgaatgaatgtgtacacacacacacacacacacacacacacacacacacacacacacacacaccacctcaagactggaaagaagaaaaatacacaaaagtgagagaaaagataggcccgaacctagagcttaatgacatggaattaacattgagactaccatgtgccaaagtgggctagcatggtattagaggagagggtaacagagatcagtccaaggactcctttcttgaagggttttacttgagagaaaagaggaggcgaagctgcctattgaactactttgccttttgaactagggacagagtaacagaaggtggagctataaggctacatgggtgcagtgagctccccttcacaggcctccagtggattggttaatatgaattattttgaatggctaaaagcataggaatgattcctgatcagtacctcagactggggtgattagggaaggtctgcactgactccatgtgacagaataaaaagtaacatggctggtggttggaccctcagtcaagtactaaaaagaaagatacaaacaaagaaagagggctggagagatggctcagaggttaagagcaccagctgctcttccagaggtcctgagttcaattcccaccaaccacatggtggctcacaaccatccattatgagatctggtgccctcttctggtgtgcagataaacatggaagcagaattttgtatacataataaataaataaataaataaaatgtttaaaaaacaaagaaagaattgatgactaccagtcattcactggaggttcaaacctggatgacacataaacaatgcacaattaattaatttacacagatattaatttattcatcatacacatttttttttcatgtcagcccatgggaaaagagaacaaggtgtctgagggaggaccaggcctgaaaaacacatccattctgcccatattccattacctagagtgatgtcacagaggccagttattcatacggtcttgcagttacacaaaggaaactgggaaatgtagtctggggcaattattctgtgtgcagaaaaagacaacgagctggcttgaataagtctatactcctggggatacccccactcacacatatgcacacacactcttacatggtaagcctcttaagggctatgacggtcccttgcttgtggttcttctccagcaactcattctgcatcgggaggggttcttaatggacaggcatctcaaaaacaaaaaacaaagcaaaacaaaaactgagtaatttcagtgtgcaaaaatgggtgccacttcagggcctggcataaatagctgctgcctagaacatcatctctgttagttaaatttaatcaccatgggtgggggagaagtgagacagaaataattcccaaaccttcagctttttattgaatttggaactgggtaaatatttttaataacattaaactttggcctctatatagcaatgtttggtccttggagtaaatcaaacaagagttgctaatgagctgttttaacatggtcaccacctctggttaaaggttccacttgacttggctaccaggtaaaggtgagtcagggctttcagatgcactcccagtggtggaggctaattacattaaaacgttgttttcctgaccttttccttttgttttgagttttttaatcaccctgactttttccgcctttttttttttttttttttaggtttctccctttaaaatcattgtcagcatggcattaacattttctttaagaaggttaattcgaagtgatgccagggaaagggtgaggaggaaagaaacctctactgcggagcctcttactcaacactagcctggaatttaatgctgcctggaagatgttcagccacaactggagagatggctcagaggttgagaacactgttttgagttcaattcccagcaaccacctggtggctcatgaccatctataatgagatctgatgccctctcccggtgtgcgggcaggcatgcaggcagaatcattatatacctagtaaataaattaatcttttaaaaattacatgaagatgcttagccacaacctgtcccgacctgcaagacatcaacctggggcaagagagtcagggagagggaatgggggggacaagagacgcagaaagaacgaccacaagccaggattctgatcaagtggcaaactttacttttctcaggctggcttatatagtcgggatatggggaggggtagtaagggttgtttgtgcaccaggtgttagtgtaggcaggatattaggaagccacaaagaggatgtttggcagggtaaagagttcatgagtaagaggtccaggaagggttgcctaggtggctgagcctgtggggggaggactgggtcaggttgattcttttcttgagctgaggttctaaggagctgctatgtaaaggtttactatgtggcctgtcaagcatggcctaggatctcatgccacaccctgagatttggctcccaaaacaacccaaatccatctaggagatgtccagccataagcaagtccatagaaacacagaggcatcaaccaaaccttccagaatctcacagttacaaacttgggccacatttttcatgcatagaattctttgttcacacacacagcatatttcaacaaataggcagacattaagttgtatatcatatacccaggccctgctctgagtgtggaaaaatacagaactgatcaaatgagaaatccttatccatctagagtttgcactcaagtggtaggaagtgggtaatagtttatctcagcccccacccctccaacccagaagtgatttcttttattggcgaagtttcctgggtatttactctctttcttttgacaatgctgccttgtgccagacatatgcaagatgacaaagagcaggatggcctcttagcctttgtattcaccactgggcctaagacagtgttagcaaatgcctatacgatctgactggatgagtagatgtcttcacagaggcacaatcaggccctaaggcagctgaactaacaaaacagctcgacatccaagagggctatggcaatgctgcttcactctgccttctccttcgtcatggggactaggacggaagggcatgagactgagtctttcttaccatgcgcctcatactgcaacaaaaccttgccgtgaatcacgagtcttcactctcaagggagaattttaattctgtgaggatcacaaaggataagacatagaacacatcgaggtctactcgggaaattgtggagagtccattgcacttagagagcatgtatatatagggctatgggtgtctgttccggccaccaggaggactttgaactttactcaaaagacaccagggagccctttcaaaaaacctaggtcagggtggaaagaggccattagatttcaactcctggacatcagcttgacctaaactctacagtcacagtttgagagaggcatgactttttaaaatgtatatagcccatgttaagtttgtattttactttgttgcctggttcacagtgcacccagatatagaagcaaatatttaaagaatcaacatctacctaaaccaaaagggagagtatatatttcttattccagtcgaatacatttcacattttaaaatactagtcaaaactcactaaaccagtttttctggcggttaaagcatcttgactgaaaatttgaaaaggtcgtaggcctgggtcagataacagtgaaggtaaagactggaggatgacagccaccccctcggatgctaccatcctatacttcctaccaaatgtaattccacaacccttcattcataaccaccttattccccctagaaattttacatggaaacagctggccacttaaagggtctcaatttcttgcccagggtttgtatggccaggagatggcaaagttttaatttatgttaatatatttaaagtagtagttctcagagctcacacttttaagttctactatccagatgggggccgctaaccacagatgccgaatttgattgtaattatttgaaactaaattttaatggattttaaaactaaaaatccatcacctcagtcctgttaggtgcatttcacaggctgtagccaaggtggctagtggcctccataagggacagctgtagacacacagtattttcctcactgcagaaggctccgctggacagaagagctctggagtgacagtcccaagtgtcctggagaacagaagtcacctcagcatgagagtgaggcaggaggaggaagccaagatggagaacccacaacatggggacaacagaataggacagtagcttgggaaggagtctgaggcggaatcagaggagtggctttggcgtgagacgggacagttcccaccttggctcataaaggaaaaaggcagagtcccagaagtgggccattacttggataaatgtctcccaaaggagcatgtgctaaaggcttggtcaccgccctgtggccctacagggaggtagtagaatctggagatgtgctcctgggtggtagagaccatgggaaatgaggcggcatggcatctcgtggagcttgttgcaggaggccttggttaagtagatgcctatagaacctccaggtgtgggtgcacaatggacacagaccacaaagagaaactctggttctctaatggcgccacaaagtgtacagagggcggggaaggggcatcagtctatacagagtagaaggcagttaatggcttcctctaactgtgtgactgtcgcagctgcacaaaggggctttgtacagctcctgtggacagaagtgatttctgagtgcacagcgaaccaccacaattgctcggggttctcaagccctgcacgtaggtgtctttgagtggaaaatagcactgtgccctgccttctgaaaactattccattattgtaataagcctgctcaggggcagaggctggaatttcagtgggctgaggggcccctgccctacggacaatgccagccaaggatcgacaatggcctgtacactgtaatagacacacagtccacagtcacagactcaccagtcaccacacttccactgcagggttagtgtggtggtttgaaagaaaatggcccccaaagcgagtggcactactaggaggtgtgactttgttggaggaagtgtgtaactctgggggcaggctttgaggtctcttttgttcaagcatccctcagagtgagagtcaacttcctgttgcctgtaagatataagactctcagctccagcaccaagtctgcctgcgtgctgccacgctccccgtcctgatgacaatgaactgaacgtctaagactgtaaggcaccccaatgaaatgttttactttgtaagagttgccgtgatcatggcgtctcttcacagcaataaaacccgactaggacagctgtctttcctcacttggacctttctgagaaaacaaacttgtctttgaagttaaaaacactagacttgactagcaaaacaggaaaataaactataaaagactcagatttttaaagtttctgccaaaacattctttaaaactaagagcacttattaaatatattatccatgttgtttatattgagaaggggaatcacacagggtaagccatgaaggggaaactttgtcctgtgtgtaacaacctaaagctcatgtggcactccaaggcaaacgactatcacgtagtttggcttctgtgtcactgtccagtgacctgatgactatagcattatgccctccagccgcccactcccatggaatttagctcacctttgactctgaacacgaatgagttctcccttactacatgagaatttcttaattaccctctctaactagcaattgggttcaggttaccagtgtgggaaggattaaaatcttagactgcagcaaaactacaagtgtttaaaatccactctactctggttctcacacatactcacacacatacaaacacagacagacacacacacacagacactcacacacacacacacacatacacacagactcacacacacagacatacaaacacagacagacacacacacacagacatacaaacacagacagacagacagacacacacacacacacagacacacacacagactcacacacagacacacacactctcacacacacagacacacacactctcacacacagagacacacacactctcacacactcacacacactctctcacacactcacacacacacacacacacacatacaaacacagacagacacacacacacacagacacacacagagagactcacacagacacacacacacagacacacacactctcacacacacaggcacacacaggcacacacaggcacacacaggcacacacaggcacacacaggcacacacaggcgcgagcgcgcgcgcgcgcgcgcgcgcgcgcgcacacacacacacacagcacacacacacacacacacacacacacacacacacacacacacacacacacacacacacacacacactcacacacaggcacacactcacactcacacacacacacacacacacacacacacacacacacacacacacacggtttctctgtgagcagggttagcctcggagatctgacagtggaaagctggttagggagtgttgagattggtgtgagaacccagattctggtctgaattctctgcccactaccagctttatgtactccagaattctcagttgttgcctctggaaacagcaggccctacttggtgttgtcatggtcaggtttacatataaaccactcaggggcatgctcgagcacatgcttgaggtgtgtcagccatcatttttacacacataacctctcatccacatggaatatttgcactgtgattgtttccatggcaacttaacttgcctatttccaggttcttaacctactattttctttttttttttaaaggaagaagttgtttacaggctagaatgttcatgcttagcacttattagcataaatacatcctaagttgtttttcatttatctccctgagtgttggtatgtttggtttttttactgttctgtgttcctgatgtcttcagtgagtccactgtgcgctgcaggtagacatagagagccactcgggtctgtgtttttagctgttgttacttgggtacatgtgttttcctgtgtagtaaggaaatattggaggtggggcataaaagaccctaaatcctgtggcataaaaagtatatcatgaaactgaattttgaaaattataatttgtcctactacccaggaattaacaaaacaaaaaaaccttctgacttaaattttatcttcttagaaaaggtgactttgggggctggagagatggtgcaatcagtcaaggatttgccttggagacatgaggacctcactttagatccccagagtgcacataaaacccagattggggcctggagtccagtcgtagagaggaaggagtgaaaggcaatggggtcaagaccatgctggggaaacacacagaaacagctgatctgagcaagtggcagctcacagactccagagtgacagctggggaaccaacataggaccaaaccaggccccctgaacgtgggagtcagttggggggcttgggcagtctatggggctgcttgcagtggaaccagtgtttatccctagtgtacaaactggctttttggagcccattctctatggagggatgccttgctcagcctagacacagcggggagggtcttggtcctgtaccaaatgatgtgacagactttgataattccccatggaaggcctcaccctctctgaggagtggatgggggtgggatggggagatggtgggaagagtgggagggtgggagagagagggagctgggattggtatgaaaaacagattgttttaaaaataaaaagtaagtaatttttttaaagccaggtttggcagtgagcacaggtaatccaagcaatggagagaggagagctggaggcagatgggttcctggaggctcaaatccaagctagactagcttagctggacaaggatcagcccagggagagaccctgtctcagatgaaagatagagggtgcccaaggactaataaccaattttgttctctgaccttcacttgtgtgccatgtacacacacacacacacacacacacacacacacacacacacacacacacatacacacacacacacacacaccagagaaaacaaagagatttcaaagcaataaatttccataaaataaaaaccatgcgtgtgccgagagcgtttatttacagcttgagctctgggaagtttgcggtacttagagcagctctgcccaatagaaacagatcaggatggggagaggttgatcaatgggtgctaagtagcagtcacgtgacagcacggctccccagagctacgaacagtaggtgactatagataaccattgtgtaccgtacatgtcagaaagggagacaaagggatttcacaagttccgacataaagggatgacaaatgtttgaggagacatatttgtttatcctcatctaaatatcccatgatgtgtgaatatatcaaaatattacacagcatcccatgaatttgcaatttttatgtgtcagttaaactttaaaaaatctctttcacacaaaataagcataccatagtgtatattgcatccacatatatgtaaatttaaatctcctcgttcatatcggaacaagtgtaagcagcataaaattaattttgataacattgcattaatctgatggacttgaaataccatcatgttaaatgtagccagtgtaaaatagaaagcactggtcaactgtactattatttgtgttacgtttttagaatccaatgtgcattttgtttgtatttggttgtatttcattttacaagatttatttctgtttattgtgtataccaagtgtgtgcccgtggagtcgcaaaaggacagcagatctcctggagctggggacagttgtgagttgctcactgtggccgctaagaacgaaactcagatcttctgcaagaacagcaagtgctcttaattgctaagccatctttcagaccgccagtatatattttatacttaagcccatgtctgtttgaacaatctgtgttcaagtgcccatgctacatgtgagtatctaactaatttctcccctttgactcatccaagcattaagagctattaagaggtgggggaggagagaggaaggaggggagagaaagaaagaggacagaaagaagagggacagagagagagagagagagagagagagagagagagagagagagaatatatttcaagtctctacaggaaccatagcacacagagcacacctctgtgccctggattcacttgtggggtcagagcatatttttcaaccctcctccaaattaagagagaaggcctacctgggtctccctttggcagaaggccacattctgagacatacaatgcaatccactgagtttcactgccaaataaaaaggagactgactgttcccagcatcaaggggacgctgggcagcttggcattcacaaagcatgtctttcatggcctcctaggagctctgacatgacttgcaagcaggaccctccaaggagccatatggggacccagacacacaggtgaggtgtgctctaaggaccctcaaaaagctttctttttgtgtttcaccagcctgtctcagacacccttcctgactctatgcagcatttgctagccattaagggttaactatgaaaggaagaccttccctcagagagggtgcggttgagcttcctgccttcacacgctgagccatctccttgactcacctcttatacgggctatatggattcagtgtgaagttagcagtcattatgagtgatagatagccactacgattgctcctgggtagccttggctggctgcttcacataattcttcaagctttgaagtgtgtaaaatcttttgacattgtggcactgtgttgtcatctacaaagttcatacttgagaactgggtaacagagtctctctctctctctctctctctctctctctctctctctctctctctctgcctgtctctctctgtctgtctctctgtctctctctctctctgtctctctctctctctctctctctctctcacacacacacacacacacacacacacacacacacacacacatgcacagcccttttaagatagcaattttatgctgggccatatttatagctatgcagggagtgtagcctgagagccacaggagaccttcattaataagccaacagaaagagctttacaagccagatctctgtgccatgaacaacagaaacactcctggcatctttgatgttgccttaagataaaccaagtacattctgacttgagtgaggtcacgctggtcctgaccactatcgaagtctcctaacccaaaaagggcaactctatattcatattgctacctaggaccacacacctgccatcgagtccctaacgaatggcactcagtgcagtctgaattgtgcctgctactgtttcccgtctcacgccgtcttggggctaattcttatgaactggaatgaagttctagaacaaaggcgcccatcccatttatgggggtttcaccctcacgactaaaccatcttgtccatggcccctacctcttaatgccagaattgtgattagatttcgaagcatgaagtttgggggcatacatccagaccatagcaaccctagatgaggaagatgactgaatcccagagcttggtgtgacagaacctgagagtcactgctctctgcactttaccgaaacttcattaaagttacattaatccattaacttttcttcagctagaaatctgcagacacttttgtaaactaatatattaagtgctaaaacttttcattagagcttagtagggcatcattatccaatgcattatggtgccaggatttccacacatgtcatttcactttgccttcataatgacccagcttttcagaacttgagggtcagggaaacttgcccaacatcacatggtttgaaagtggaagactcagactcatttgtttctctgcaagcgggggttggaatcccacaaaagtagaagaaaaagggcaaatgtcaaataaatgaaatctttgggagctattgcaaaacagttgggacaaaattcatagtttgatacaagttgtaaccggcacattaaataaaaatcagaactgcctcttgtcgttttaaagtttacaaaggcttggtccgaatcagtgttcttcctcggctgtttccttgccttgctgcaccgatcaggaacagtgaggtaggtgagatgtttggccagtaaagaaagctttttccaagcctgaattgatccctggaactcacatggtgtaaagaaccgactcctgcaagttgtcctttgccacccgcaggctggccatggcttgtatttgttcacacacacacacacacacacacacacacacacacacacacacacgcacgcacacacacgcacgcgtcaaagtaaaaagtgatctgactccaaggacaagcaccatcccaggtcctctacaatgcactttggtccttcctctcactgtattctatttttagcactaattccactaattcagggagctgaaacaccggtggcattatgatcctcgcttctaaataccaagtattagacttccaagtatcttcccaaggcatcttttcacccactctgttctctctcatcaaagccccagggcaccgaggccttcaaagacctgatggctcaaggatgcattgtgaagtggcgagagcgtcacaggctacgtggatccaaggatctgagagtggggtgggtttctcagtggcccccaggaggtctcccgaccttcctgtagactctgggcccgccgggaagagagcatggccggcttccacctcttctcacggccctatggggagcttggggagcccttgcccggtggagagccggaattcgcggcaccgctgggctggcctgagccatccctgagcccctgggcccggactcccggcgcggaaatcgagaccgaggtgccctgggggcaccagaaatgttcatccgccgcgcggtcccgccggcgtggttctatgtccttgccacgagaaagccacagcctgacacacgtggcccggagaccggcggaccgcgccaggaagcaccggtccggcagtaggcaactggacgaagcctgcggagaggcacccaccaagtccagcaggacctggcagcagcagcagccgccgccgccggatcagccctgccccagctaccctgcagccccaggagtttcgtccccgccgtaccccgggggagctttcagcccccagagtgctgggactttgcctttggaaaagacacacaacggagaccggtgggcagtgccggtgtacagacatgtaggtctctggtccccttcgtcggttctcaccgacaagtcttccgggcactccctcgagtttgagttccggaagcaatccacccagaagaggggtagtggcgaccggactgagtccttagccaaccagtactcccagccctccacctcctgcaaagagacgagtagccagcaggctcaggtcctcaagagcaagctggacgaagcagagatatcctccagggaccagaagatcttggccctggtactgagccggctcaagaaggcccagaagatgcgagagctgcagcaacaggcagcagtcgcctgggaagagctgaagcgctcagacaagaaagtccacatgaccctggagagagagcgcaggctgctgctgcagcagagccaggagcagtggcaaggacagaaggaacagcacaagtcacggagggaccatgagcagcttcgccagggctacgagcaacagggcgagcggcgggaccgccaggagaagagcaccatccaggcccaggcggagagccagagtcggtggcccgagcaacctgacaacccagagaacggagacctggacaagctagacagggttcacgcccaggctgaacacctcaaacagtgccagatgcagcgtctgcaggagcaggagagggtgctgcagagtctgcgggacctgaacaggctgcagatgcagaagaagctggaggtgacctgtcacaagaggcagcagcacctgccggaggagagtcagaagaaggtcccggagaacaacctgagctcctccatcatcaacttccaggcccgcaaggttctcatggactgtcaggccaaggcggaggagctcctcaggaagctgtcgctcgagcagagctcccagagctcccaggacgtccaagaagatctggctaaggagaggcatcgagaacagcagggaaaggcccagaaggaggcagagcagttccagcgagtgaggtggcgaacagaggaggcagaggaacggcggcgccaagagcgccagcgggtcctggcggagctggctgagcagaagatcaggcaggccaggtgtcatgagcacaagaccagcaaggacagggtgcagcacctgcaggagctgagcgtcctacgggagaggaacaaccacatcttgaagctgaaagcagagaaggaggagaagtgtcacattgagggcatcaaggaagccattaagaagaaggaacaaagggtggagcagatgacccgatggaaagatcccatcttccaggagttccagaaggttccctcggcctccaagacagaccgctgctttgactatgtggcagcagagacacagctgcctgcgcaccatctgagtggaatctattgagaacccaggaggaacacagcacacgccggcagcgacagaggtcatctcatcgtcatcatgcgattcggctttataatctgattttaaccgaccattgattttttaaaaaaatagataaaatagctgcaatttcctcccatgaattagtacatcgattcactttgatgatgcggatggggttggggaggaaaagtggggggcaggtatgaaaattggttggcttttgagttttgaggtgaaacaaaaaacattcatttgcctttcaaagagtctagaaacatacatgaggcaggagttagaggagtcagaaaatgtacaattggcctggggggagggcagaaaggtggaggtgcacacctttaatcccagcactcaggaggcagaggcacaggaagaaggcaaatctctgcgagtttgaggccagtctggtctaaagagtgagctccagggcagccaaggactccacagagaaaccctgtctcaaaatacatacatgcatacatacatgcatacatacatacatactacaattggaaatattgttttatgatacaacttggtaactcttgtgccaaactacagtgagaaaggtgaaattcgtagtgtgaggcctgagaagtctccagggtaaaaagcaaaggtgggctaggagactttccaagcaactagatttgggagtcttgtatattccaatcctttcgtgatgcacccttaaatttaaaagtctgcagtgtagacactcacttaacctaacctggtgttagtgagaaacctcaaccccacctctctttttctttttcctttcccagatcattccatggaattgatgttcagtgatgaattgtgtgtgtgtgtgtgtgtgtgtgtgtgtgtgtgtgtgtgtgtgtgtgtgtgtgcgcgcgcgcgtgcgtgtgcgtgtgcgtgtgtgtgtgtgtgtgtgtgtgtgtgtgtctctgtgtctgtgtgtctgtgtgtctgtatgtctgtgtggttccatagttcctccagactgaggagttctttggccatccctactcatggcaatattgtttgtaacccactaggactgtgtgtcaactgtcccaccagtcatggtatctaagagctcagtgaaacccagctggcacacaccacctataataccagcactacaggccagcatgggctatgacacagtgagttccaggaccagcctgggctacacagtgaggccttgtctcaaaaagaaaagaagtaagacactgtaatacacttggtctttcttggactggggataggaaggtggggcgtggtggggtggaaatggagagtagggggtgggagctggggatggggagctgggggtaggatctgggggtgggagctgggggtaggatctggggagtgttccatccagctttatgcattcagtctcagtagcattttctcttcccctctatttctctcttttttaaaaaaaatatttaaattagaaacaattttattttatatgtcaatccaagttccctctccctcccatcctcccatggcccccactgacccccatcccatccctcttctgctccatagaaagggagaggccttccatgggggaatcttcaaagtctgtcacatcatttggggcagggcctagtccctcccccgtgtgtctaggctgagagagtatccctctatggggaatgggctccccatgtccattcatacactatggataaatattgatccactaccagggccccatagactgcccaggtctcttaactgacacccacattcagggggcctgattacagggggctgtaaatctggggcccatgagctccccgtgttcaggtcagctgtttctgtgggtttctccagcgtggtcttgacccttttgttcctcacttctctctacaactggcttctgggaatttggctcagtgtttggctgtgggtgtctgcttctgcttccatcagctactggatgaaggctctagagtggcatataaggtggtcatcaatctcattatagggagaagggcatttaaggtagcttcttcactattgcttagaatgttagttggaggttatccttgtagatctctggacatttccctagtgccagatttctctctaaacctacaaggctccctctatgatggtgtctctcttcttgctctcctctattcttcccctgactcaatcttcctgctccctcgtgtcctcctctcccctcctcttctccccttctctttctcctaactccccccctccatgctcccaattagctcaggagatattgtccctttccccttctccagggaacaatatatgtctctcttagggtcctccttgtttcctggcttctctggaggtgtgggttgtaggctggtaatcctttgctcggtcttctctgtctcttttgaaggaggcatgtgatgtcattttgtctacctacattgagcctaattaacttaactaggctctatacaagtgactaaacatgactcagtaatatggctttttaaaggtaaggagtcagtaacaatagaaagtaacccatctctcaacttcagcttaacgaccaaatgttttctttaaaaaaatcttgatgtaaaactttaaaattattttggttgttattgtctgtggggggggatacacatgtcacagtgcccaggtggaggtcagaggacagggatttggctcaggttgtcaggcttgcagcacacagtagtgagcacctttactggttataccttcccacgccctattgtaggataggatatgcgtgaaacgggaaagggaaaagatagatggtaagtgccattaggattttcgtcttgttagtaattatgaaacagcatcaaacataaccaggccagtactttagttcagaggtcagtgtgacatccactctgacccttgtccctctcccgtttacttcctctgtcctaggtcccctccaccagctggccttaaatagaccagctgtgccatctcatttctccacgcagacacactcagagacccctgctcaagaacacaagctctcacagatcaggcctcggtttcccatattacgttcttcatctccaagtcaatccattttctagccatagtggtgggtattctgggacaacatttaagatgttttagaccaaccttgacgtgaatctggggtttcctggtctataaaatcagaagtaacccatgcttcccaggcgttgctgtaagggaaaattagatgaaatcatatatgcaaggtgttgggcaaagtaacccaggatctaatgctctgtaactcaataccacggctcttattactaatattgatgtgcgccattgtcaaccccacccccttgagcttaatgccttcacaccagcttccctcctcccaccacacctcaaagtgttcttcctgagcacagtggccatgctctgaaaggagtatccattttgcaatttaatcttggcttcctaattggactacatgctacccgaggccagggctagtgccttataatttatgatcttgcttaaggatacagtcaatacagtgtccgaatagaagacagcaagtgggatgtgttcactccacatccagattccattcctctcctgcactgtcctttactccaagaaatcaatatagactcattcctttgtctaacctttgtggaaactactgaccaaaataatatgtacaacataaagttgacagaagtgaaggggcttccccatcttttaagtacaactaaaacgctaaatgttttatgtaagacaagcagagaattctacaaagagtcagaccatctctaagcttaggagccaaaataaccccacacagtcctaagttccttgagttttcatttcgcctcatatgttccagacctgggagttgaagaaatactaaagtatggacaacagtcccagcacagcctggtgtctccaaccaaagccctagaactacatgactccaggtaaactccacaggaaaacctatggctttgcctttgcccatgctggcaaagactgagcagggaaatggtgttctttctttagcaggttgtgataaggagataccttcccctgtcctagcaatgctggcagaaactgcatagcagcctaggctcctaattactccacacatctcaacgttctgctgagtggtatcataggaagcctggcagggagtagaaacctttatcactacccagagaaaaaggactacacatcgtcccatccctcacccatccaccttgctacccggggagcaaagcagacctcctgctccgcctggcctgcagcaggatcagctggaagaatgtagaggaggcccaaggctcctgcccccttccagcaataaggaagagtagttttacccgctgcagttggcaatggctaagtggggaagtggatttttactcctgctccacagtatgaggcaatgacatgttttatttcctggggtgataccaaagaaagtcaggtgtaaaggatattttaaataaggcccaatgagtcttttaactgaacaaattgtctaggtcgttattgaaaatcattccacaaagaaccaagtctatctcaagctgaatgagaaagaatctgtatatgccaaaagaaatgttggagttatctaaaaacccatttataagcagacatagcaacaacagcaacaaaaagcttcaaaaagtgatattgagcacacttaaaatagtcaagaaaacctcagcaaaggcataaaaagtatagagaagaacccagtgagaaacatggaagcagaaagttttacgatacaaaccaaaagctctaagatggctcaatatgagaaggctttttctgtgcaagcctggggacaggagtttgatccctagaacccataaggtggaagaagagaacagatgtcatgaagatcgaaagatcaattcaatggctttgtctgcagaacaaaagaaacagagggaagaagccatgagacagaatagcaaaaacaagcaactctgcaagtaagagagaaatttcattaaaaaacaaacaaacaaacaaacaaacaaaaaaaacaagtagagcctcctggacttgcaggactgtgacagaagagccagggttcgtggtgtgggaatctcaggaggaatgcaaagaagggactaccttggaaaagcactctttcaaatatataccttaaggtcttagataaacaagaacaagctgaaccctaagtcattaaaagaaagaaatgatacagattaaggttgaaattaatgaaatggaaaccaaagaaataaaaagaaagtaccaagagtaaaggactggcatgttaataagccaaattaacaaacactgtccaaactaaccagagagagaggacccaactttttttgttgttgttgttgttgttttgtttttgttttttgagacagggtttctctatgtaacttcggagcatatcctggcactcactctgtagaccaggctggactggaactcacagagatccacctgcctctgcctcctgagtgctgggattaaaggcgttcacccactgcctggctccgagaggacccaacttaataaaactacacatcacaacagataccactaaaatatagatcattaatggctttctccccatggattgctcaactggattcttacctagcaattactaatcaagaatatgccctacagaattgcctacaggcatctgatagaagcattttctcagttgaggttctgcttcccagataactctaacttgtgtcaagatgacagaaaataatcctcatgccaccattgtacggggtggacacatcttgcctagcaggttgttattgtagcaccccaggtctacagctgggtaagacaagtgatggcctttctctcccagcaaccatgaacgctggccagcaatgagagagcttccagtccagctccagcttaatctctctatgtgctgtatccggagagtgtgatgtcttcagcaacagggtcttaccatctagttctggtgggcaaccaagagcagtggtgatagcctgtattgtttgggggtaggggtggtatctgcagccctcctgaacaacaactcataaggaggtatcccatacctagaatttcattaataacctattgcttctgggagcagcattaaggtctagatttaaacacacatacacacagatacatgcacatacacatgcacacgcacacatacacacagagagacactcatacatgggaattatttgggagaagagatgggggtatgaacaaagtacaaattgtgagtcttatagtgatacacattaattttcatattaaatatttatattgtaaagatctgttgatcggttatgcacacaaaggcaataggtggagacaaccacaatttgtagaattaacctatgaagaaagcatgacaattctaaacatatatgtaccaaacaacagagctacaaaatagtgggaaacaaaagtcaaagaatcagaaagagaaacaaacaaacctcagttacagctgctgactttattaaccctctctcaataaccaatgccaactcagcagaatctggaggattaaagaatttgacaacaccacctgacaagagggtctaatctacatttgcaggagtcacccaaaatcaaaatgcacatccctccccccccccccgagccgcatacatcccaagatagagtctatcatggactacagcataagcacatcttttaagagagttgggataatacaaagtaatagaatcaaatcataagtttgtatcagaatgttaacaggaaaaaatttcaacactcagaaatcaaacaaagcacctctaagttacctagaagtcaaagaggaaatctaaaggaagatttaaaaatacactggtctgaatggaaattaaaactgtcatatctgtgggacacggcaaaagccacactgggaggaaaatcagagcatcatgtgcatgtattagcaaaaaggagaagtcttaaattagtgatgcatgattccaatccagcaatgtagagaatgagcaaaataaaatggaagcaaacattagggagaataaaagaaaaaccagttgaagacaaatatagcagacaaaaatccatgaaacaaagatctggctctttaaagagttcaaaaaaattgacaagcctctagaaaagccaaccaaagaatcacaaaaattaccagtgtcatgaatgaaacagctataccaccaaagaccctaaggacatacaaaagataaaaaaatataaacaagtttatacacagattgacaacctaggcaaaagatcaatttctaaaaaaaagaaaatgctaaataatacaactcacacgctaaaaaatactctttaaatagtcatgcaattaataatattaaattcataattaaaaactgcctgccagatctagtctgcatggtttaatgcaagaaattcatttaatgctaaaagaagatatgacatccattatacacaacttcttccagaagattgggaagcaatgagcacgttccaattcatttcaggaagttggtattcccttaataccaaaccaggagatcatatgaaataaacaagagacagaccaatggccttcatgaatatatacataaaaaatcttaagatgttgacaaattgctttcaagagcatttaaaaagaaacacatgccacaactaagaatgagatattacaaaaactccagttggctcaatcatataagaccagttagtgtctgaacaaaccatttcatcaacaggctaaagaagaaaagtcacatgaacattattgcttgatggagaaagagaacttagcccactcatgaatatttattttccaaataaatagaaatattaataggagagaactcattcggcttcataatgaatagctacaaaaataagtaaataaacaaataaagcaaacaacaacaacaaagctattctgcagctaacatccaacagtgaatgccttaatgcttaccccaaaccagacacaagacaaagatgtccattctcaccactcttaagcagtatggtgctgaaagggaggaaacgaaaattaaaggcatataaataggaagaaaaactctacccctcagcttgacagaaatacgatcatttatgaaagtctgcacaatgttcaagtactattagtcacaatgttaggttaaagattgatagttctacataaaccaatgaaattcacatcgctggaatttacaatgcaatattttttacaattatctaaaagtgaagaaatacccaggagtaaacatcactgtctaaacatagtccaccaatagagctgtgtgagggtattctgagagcttatgagacaacaaggcagacagacgccttgtgaccgctgttacttctaaacatggattcgttcttagaatgagcttttgtgacccttccaggtatacttatacttccaagtataagctggtttacttcagattacccattaccttacttttattattcaaaaaaaatgtttgtaggcacgaaggtttgtatacagctcaaagacatatgaactttgctcatgtgattttgcttagccctcaaaataaaagttgtctggtgttctaaataaaaatagctattgcatgagactttagtccacctcatttttagactgcactctcccaggtccacactgacaactagaacagtgataacaacaaaacatgtatagaactcgtttgcctgaacttcatgagaagctgaagaaataagtcatagaggtaatccacggtgaggccctatgaaaaggctcaacacagctctgccctgtttgagttcctgtgataaaatactctgacaaaagcaactctgtggaaaaagggtttgttgtagctcacacttccaggctgcagtccatcactgtggggaagcaaggtaacagaaccttatatttttggttgtgagcctagcctttaacggctgagccatctctccagcccaggtaacagaatcttaaagaggcagttaggtatagtatatccacaaccaagagaagagacctcatgcgcatatccttaggctcagctctctttttccactcttacacacaagatcctttgtccaagccatggtgttgcacacagccttcctgcctcgatctctgcaattaaggtaatccctcatagacacgccgaggagccgtctgatctagacaaacttccttgacactatcttctgagctgattctagattatgtccgtttgatgattaaagaaagccaagccttgctaagacatcaaatgataacttttgctgttgactaaaatgtaataatggaacccaaacttctttataatatttttatcagtgtactgtggcccaggaaaagtaagcttggtgaaaataattgctaccaagtaaagtccccaataacagagactgtaataggtcatgtttgatgttgcccaaatctctgatcaataaacgcaattgatctcaacataaggagtctttttttaaatcaaaggcaaaaaaaaacacctcaattaaaatgtagtaaccttgtttttgtgatttaaacatttgcatataagtttatgtcagatccaaatgaatgatgttggtgtatcctaccctctaatagccaaatcttatcaaaggcttggtatgtcccaggcatttatctgtttgattgtattgcttccctatgacataagcattatggtatttcacagataagggacagcagcatagcaggaaggttggacagaacttttttgttattgctcataagtagcagagatggggtttgaacccagttcttttgaaccttgcatccattttgcatctttctcagcttgtagcaatttagtggttaggatgcaggctctaaaactagactgcccctggtcaaagtgaggctctaaccctgaactcagtgaattatcttgagcaaggtttataacccacccaagggttaatctccattgctaatttgacttcatttagaatcactcaagtggcatgaaggcatttccacctaggtacctgtcttacctgatgcaggcagcagtgtgggttggtgccctgaactgaataaaagccggagggagaaagcagccagagaaccaacattcatctctctcagcttcttctccttcttttgttgttgttgttttgagacagggtgtctctgtggctttggaacctgtcctggaactagctagtaaaccaggctggtctcgaatttacagagatctgcctgcttctgcctccccagtgctgggattaaaggtgtgagctaccaccacttggctctctctgcttctgactgcagacacctcaggctcctgcctcctgcctcaatgccaggatgaggcacactttctcaatctgtgagcccaggagcccttctttcttccatctgaccttccctcttttcttctgtcagtcctccctccctccctccctccctccctcccccctccccaccctccctccgttccttccttccatctttctttcctttcttctgtgtatcagttccttcacacagagtacctaagcacacaactttcaggtttgtgatgttaaatagatgaatgtgtgaaggaaatgtagagcatgatgggagctcagtgtttttagttttttgtttgtagtttgaaatattcccttgagtctgatgctggtcaaattttagcagttaaaatctgatttatgggccagggctgtagctcagtgacaaagaactcgcctagcatgtataaggcaaagagttcaattaacaacattgcagtgtgtgtgtgtgtgtgtgtgtgtgtgtgtgtgtgtgtgtgtgtgtgtgtgtgtgtttgtgatttgtaagcatggcagaatttgggaaagatgaataacaacctaacacttctcacatattagacaataccaccatttacatcagaactttaaagactaaaatgattgttagctgaacttaaagtgatagtttcaattttaaagaagtgatttggcttccggtttcgggtgtgattcacttctgactgtattgaatatattcaacatcaagcccggctttgctggtgttctggcagacacattctgacccccctgtagttcttcaaggtggggaggggcatgctgattttatccctgatattagaccttgctgggtttctttattgcttcaaattctttccctggaagaggtggggatataaacaatacctggcctccctccaaaaggcgtcaatgacaaactaatgtttaattccacccaacttggccctgggaaaccaatgagtttattgaggctgtttacagcctagcaaggtgttcctaacaggacacaggtgaccctacagcagccacaccaacagatctttacccaacatgacggtggcttccccaaggcttcataggtcaagttcccttccctcagtttcccctaccctgtgtgctccagccctccctcacggtgaaattacatcaaagggggggggatattcaagtgaggctccttcctcctccttctaggaggcagagccatccatcatgtgcttttgaaagtagtcaagcctgacctgaagatggtgtctgttttgtcagagggatggtgctgtacaacactggttcatccctgaaccgatctgaggcagaacttgcctcctctcgtagatcttgcataatcaaatctttcgataacaggctttcagaattatttttgagacattgagcctttgccagtggattttgtctttaaaaaaaaataactcagagagttctgggtattttccaattttatgtctggttaaaaactagacccatttctcttttaatagctcttgaaacagaatagttctatttccagataatttccctgtgtttcaaaaagagttattgtttcactttgatatggcaggtgttcagactcaaaggcactggtgggtcagatggactggcaagttgatagttttgaggttaagcagaggtgacttaattctccaaaaatcagaggacccactcctaaaacttctcaatcttctttatcccattgatgtgattgtcatctgtattgggtgggtgatgctaattcctaaaactcccaagtctttcactgccttgtagctgacaactggatgggggacacaggtcttggtgatgtcacaatcctcccgcagcagtgtggatatgcatgtgtccagggactcaccgttcacagtcatgtcataaatagctcagttcagaataaaatattaattaggctttaatatagaccatctcctcacagcagggaaaatgggcaccaaaagcgttaggtgttcgtgcatatcatttgtaacccaagtggtccatgcctccaatatggaaaagcggaaagaagacttggagctctgcaaatgtcatcagggcttcaagtacagggccaaaatgtatgtcatcagggcttcaagtacagggccaaaattgccccagccttttgggagtcttaccagagtggcatggtgttgggaagagtatttaaggagtgttgaatagagagtgaaagatactagacaaagcttcaggcagatgaggtagccacggaacagtgataacagaaaagcacatgtcccgaacaatccctaattctaatttagaaccaatttagagaaatgaactctctctctctctctctctctctctctctctctctctctctctctctctctccctggacttccatactcatttttcccattactaacacatgtgaaaacccatccagacttctacttctgacatgcagatgacaatatagctccctttagaacagctactgcattcactaattacaccactgcattgcagacccaagggaagcttccacacaagtctggaaacataagggcagaatgctctgagaataatcccaggtaacaacatggcaaaaagttgacactgaaatttccagttgaacagaggccttggaaagagatgccgaagtccagactcatagaatccctggggctgacagacgcaaacagggatccattctggagacaggcacccccatgctggaataattgcctcaacttgatgtgccattctttcagcaaggccatgggaggcctgtccctttctacatggagatggaggaggggtgggtggggaggggtggtacacgggaaagggaggggacgggaggaggagatcagtgaggggaactggttggtaagtaaaataaatgaaaaagaaagttatttaaataaaaaactcaaattagaatagagaaaacccaacataaaaagaaaacaatagacacatataaaaagtgaattttaaaaatatagaaagataaaagaaaatacagtttttgccaatagacataccaggagggcagggtaaatagcatattagacacaaccaacgagagaattagtgactgtgaagagagatctgaagaacatgaagaatttctctgagtgcaatccaaagaaacaagatataaaatgagaagaagagggcaatatatatggaagataaagagagatgtttcagtatctgatcagagcccaggagggaggaatagagagatggaggagagggcaagttcaaagatcattttcaggaacttgggaaagttatatgcagtgacgtgttagtacaacggtctccaaatactacaacaaaaggaaatctaagtctggaaggctggggagagtagctctgttagtagagtggttgtctagcctgcccatggctctggattcaacatatcagccagctgtggtggtgcacgcctgcaatcccagcacttgggaggaagaggcaagagaattcgaagtttgaggtaaattttggtatgtcgtgagtttgaggctgagctacattagactaaacaggaagacagagagggggaggggagaagagaaggaaaaaggaaggagaagaggaaggaggaggaaaagggggaggggaggaagggaggaaggaagggaggaaaggaagtaactcattgaacaggacaaatgatcagaagagggcaaaaatgtcataggagaaaatgcatcacgtaccaagaaaacatttgccccagaagcaactttctcagcagaaaatgagaatcaaggagacagcagagcattgttctcttggagccaagagaaaataacagccgttctgcatctgtccacccagcaaaaacaactccacttgggagagtgaagcaggacactttcagggaaacacagacagccattcttaaaggacagtgaaaaacggtcgtgggggtaggagaaaggtctgcaattcatggaaattaggtaaatattaacaacattgactatggaaagttcaggtctgatttccaggtctactctgtgggaataaaaatgtttaaagggaaaaaaaccaaacatcgggtgacagcaagtgaaagttggggggggggtggttttgctcagcggaacactggggcactgatgtcaatggataatcggtttgggtgcagcctctgaagggaaaccatgaaatcatagaaagtttgtggtgacattttgcttgtacaaataaagcctgtctgaagatcagaggatggagcttgccactagctaaccatagaggccaggaggtctgtacagacagacaggaagtgaaatgaccggggagagaccccgaagtgagacggctgggtggagacaggatataaacagggagaaacagggtcccgctctcttttcctctgagacgctagtgaggtaaaggtggctgtggctggctccttctctctgatctctcagcattttcctctatatctgactccaggtttttattatttagaccaattaagaaccccatttacaaaagttcaatttaacttccaaataagtagaagaaatagcgaaaatgcaaagttttaattgatagagaattttttaaaaaattgatatttttttttaaaaaaaattggataagtaaatccaaaataacatacactaggaagggatagagagctgctagtcacagccgtgaatgaaaagggaccacagataacaggcggagatcgccacactaggcatttttaaaatcagtgatgtgctattcaccaggtacacatttaaacacacggaccaggagctgctgcaagtacagaatacacaaagcaaacattaacccagagaaagcgagtctttactgtcaggacaaataggctctaacacagaaaagcattgcacagatggaacagaccactaccaaataaccaaatgctcaatttatctagaaaataaaacaatcctgaaggtcttacaaacccataaagcaaaactgatagaacccacagggaaattaaactcaccaccagagtttaatgttcaaggttcctctttatttgctgatgggcaaagcagtattcagaacataggaaatatgattaccaggtgtagtttattgggcacctatagattctgcaatggactatttacagaaattaactggggaacagtcccaagagaagtgctcaaatctgcaagtgtccagtgtcatattaatcagcactctacttaaatgcaattaatttggaactcagaactatatgcccagatttttaaatatttaagtacttggcagatagaaaaaaatcacagcagaaatttgaaaatatttagggctgaacaataacaaatataccacatgctgaggtgcacagctggaaacagaaaagattatatgagagaaacagagagagtcaagtatttattaacactggagaaggaaagctgaacattagtgagctaagcactcaatttaagaaattagaaaaatgatggaataaattcatgagagtaggaagaagataaccgtaaacacagaaattaataaaatgggaaagttggcataataaaagtgattaacaaattcacatattcagtctctgacacacaggtaagtacggtagtttctatcaggaatgttccagaaagattcacaaataatactagaagtaaaaacaagggcatgaggagacatccagtagaaagtgagaagacaacagtctgctataacaatggcatgtcagaccatgcgtgagcagcataagcttagacatccatctagtttttatcacagtttgcgtatttgtgtgtcacgtgtgtggaggaggtcagaggacagcttgcaggagtcagttctttccttctaccctatgaggcccaggaagaaaactcaggttgttggatttagcagcatcctagtgaactatcttaccagctccatcattcctttaaaaataacaaactcatttttttttacaaaatgcaaatagcccattatcatttaaacaaatgaatcaattgtttaattttccccaaaacagaattgccatgcacagatgagtttgtaggtaagttcatctaagcattcaaaggctatatcctaattatatgcaaactctttgagggaaaataaatgaaaaagaatactttgcaacttattctctgagcttgctgtacctttgatactaaaactcaaaattacagtaagaaaaaaaaacataatgaagtcttcattcatgaatgcagaaacaataatcctacacaaatatcagcaaaatgaatcctgtacttaatgaaaaaaagataatactgtgcctctaagctgagtttattccaagactataaggcttaactttggaaaatctgtaattatcattcagtacattagcatattaaaagaacaaaagcaatgcggttatttcaatggaagaaacacattcaatgaaattcaaaatacctatttatgacttctaaaaattagttagctcagaagggggaggaattaccttattctgataaaaggaacccactaaaaacctacagcaaacaatattattaatgatgaaaccataaacacttgggacagcaggaagaaaatgcaaaagaagcaaaagatatgaggtttgtgaaaagaaaatcctgaagactctcgttacttactgatgtgatttccccatagtctattttatctacaactttaaaaactttatatgtacacaataagactttttaggtgtccaagatctagaaaccatttactgtccaccaaaagtagaacagataaagtaagtattctctttagcagtgttattctctataacaaatgtacggatgaggcccaaccatatcaatgacatagaatctaacaacttaccactgagtggaaagttccagacgttaaaaaagtggtccccattgtgtcatccatgttttgagaaaaaaaaattatcaaaggtagatatcctagcatatccaaacttccaggtggatcaaagtttctgtcccacctggttccgaagccatttggtcccaaataaacacagaggcttatattaattataaacaaacacactgaggcttatattaattataaactgtttggctgatggcttaggcttcttactggctagctttcttaattattaacctataactactaacctatgtatttctatggggtcttggcttactggaaaatgctctgagtcctatcttccctgtagctacgtggcatctccctctggcagcttctttctgaatcctctccccagaattctcctcatctggtagccccacctatacttcctgcctggctactggccaatcagtgttttattcatcaagcaataagagaaatatatatacagcctacagaaggacatccccataagactccttcttcctgaaccttccccatcttcattctgccaatgagacaatcacatcagattgtgaagctgagccaccaccaatgagatgagacaaagccaccacctatatcagccaaaaaagaaagaagccatcttggccaagtgtatttgctagaccagtttgggtctaggtacatctattttacaaaaagaattgccttgccaagctactttcactttgtttatatgttcccttgtgtgacagtgagattattctttgtttctaataattcgaaatacaaagaatgcttagctgagctctgcagtggagatcaggtcagtactcaccttctgatagaaagggtaccagggcagaatgcagagtgaggttgggatttagagtcagtcagtgctggctataaatgctggctctgcctcttccaagttgactgaccttaaaaactcaactggaaaacctgcatgatgttattcactttgctggactgttgtgaagtaagtcaataagagagtctgtgaagtgtctgtctctggaagttccggaaaatggcagctatagttgttatcagtgtgattgttcctcatggaccccttcactagagtctagtgactcagcataaaacacaggaaacaaatagagctgaactcagtaggtgctgctttggtccaaggcatctcttccaaggctggggagaggccctccacacctcaagtgtggccagacaactcacactggtggtgtttggtcactgaaactcttgccaaggtaacattcataggctggggctaagaccctaggaggtgctagcttaaaggctcacagttgcacttcctaaaaatctcagaaccagaggaaagaaaagctagagaaagaaagaaaaaaaaaagaaaagaaaagaaaaggaaggggctggagcgatgactccatggttcagagtatgcaaggctttccagagggctcgagtttgctttctaacacccatgcttcggtagcttgcaactgcttgtaactcctgctgcagaaaacctgaggccctattctagtctgcttgggcatcccctcacacgtctcttttccttcattttcttaggggtgaagaataagggtctgccatactgtgtatggaaaaatgcctcacacacacacacacacacacacacacacacacacacacacacacacacgccttctttttttttgtaaagggaagtcctttcatgcttcccttgtggtcagagctgcctgtgtctaagtagttttgatttggagctgagaatggagtttcagactactctacccactctattctattcggaagtaatcagccccctcccccagtctccgccctcatcctgccctgtgggtgtacagacatttagcacatgaaaagaatatagcacctgcttccctagccctacattttctgatttttgtaaaagcatctaaaatagatttcatattgtgtagttttctgacactgtttttgcagtgcttcttgaataattatttgcacttagtgtttggcaataaccttgttctgagaaggaatataatgtacatattaagtataacccttgttaatatggacacccatgagccaaatggatgatatggaggatggatggatgggggatcaacatctggggttctggaagggaactctcaacatggcagccagatttccactcagcttcaccagtcagggttcactacctttgtccttcgatggagtaactgggctccagaggctgtaacaatggatgaacggctctaagcatcctatcacagtggcttctggttcaccccagggtgactccggggtattcaaagtagtgtggaaaacaggaagtattcctctaactcataagacaaacttggaagaatttaaaatgcactaggttcctgcagggccatggcatgaagcccaaaacacaaagacaggtggctagagaagctgtcctttgccttgcctaggatgaagaactctctgagacattcattttgttgtggtttagtacatgtgaagctttctgggagaaaaggtcctgaaggaaatgatttctgtgggctcgacaacagcaaatcctctttggagcagaatggatcgaagatcaaagataatgaatggcaagcatttggggaagttagagggactatccaaaggtaaaacatggttagtaggtgtttgtagatgtccgagcactccttctcccttcttgatcaattgtccagacaccacaagatccagcatccagcctacagccagaaggctagggcaaagggcagttgctactccgagtccccactaaccaccagcaacccctccacctgtacaggggcagagtgacagagtgacactgggttcacaggctggtgggaagtcgtgcaggtgagtgtgccttgttttcaggagactctccacacccggctactgttcactcttctctctctctgcaccagactctccagagggcttcctttagcttttcatcttcctgagatacctacatggcaaggacagctgcttcccacttattaagaggacactaagatgctgaggggacaggcagatgccttaagtgactgggctttgggtacaaacacaagcctggtgatgccagcccttgggctctttgctctctgcagcttttcatcagcaaacgctggttgaatttcaagtaggcagtccaccttttgaaggcaggtaacatttggatttcccgagctctcatcacatagcatctgttctgctgctagctgccaataaatatttacagaaattgaaatgttatagcgcagtgggaaggtccctgctggccaggtcagggctccttgacagctgttttgtgagttccatgtgactccctgatccgggtggatgatctctgtataacaggactcaggggtcaccagactcacagcttccaaatcaggagatctgtgaactatgtttctctccaccctgcatattcaagagcctggtcttggagccttctggtagccaggccgatatgagaggccctgggacattgtccacaacagtatcatttaagaaatgacgtggtaaagagcatggctggcctgcttcattaacattgcacattttcataagcttgaagcaaagactgcatgattgacaatgagatcaccaagcacttccaaatgaaaaccacttaagcattgcaacagaaagcgcattagcatctcaaattccctcctcctaacacactgcctctttgttccttttcttttctttcttttttttttttacagatttatttcatcttatgcataccagtgtcaagcctgcatgtgtgcccggggcccaaggggccaggggagggagtcaggttccctagaactggaactgtggatggctgtaagcccccatgtgggtgctcggaactcaacccaggtcttctgcaagaacaatgagtgttcttaacaactgaggcatcgctccagatctgcctctccattctttaggggaggggcaggttgagacaggctttctctgaatagtcttggctgtcctggaactcactctgtagaccaggctggcctcgtgctcacagagatcctcctgcctctgcctcccaagtgatggaatgaaaggcatatggcaccttgcttgacttgtttcttcattcttccatccagatgtccagggcttgatttggcgtggtatccaaggacaacgaagtttaacttgggaaggtcctcctgagagtctagttgggagtgttgggtagtgtccaaagaaatcctggtgtttttgcccctagcctgcactgcttccggggttagactccacagtacagagtcataaagtcatgcgtgcctactggccatatgcttagactcttagtctttgatgccagacactcctttcctggtgccctccacaacccacctgtggtctaagagcctggcaagattgattccccttagccctgatcagagctgtggtgcaacttacaccaagcattgtgatctaacccttctacactgccatctactgagcagcccagggatgtccatccttactgaggggtcaaggcaaaagccttcctttggcaggagcccttcaggttaactaagtaagatgatgacaatgttttgtttgttttgtttcgttttaaaaaaaaaaaaaaaactaacaagggccctagagagatggcgcaggggtaaaaatgcttgtatgtgtatgaagacctatgttcaaatttgattatttaaaaaaagccatccatggccatccattgtgaggggtgaagagaggagagtcactggggcttgctggctgccagcctcatttcaaatttaataagagaccctgtttcaagggactaagtcagacaatggcagacaaagatgcctaatgtcctctggcctctggggttcatacctgcacacccatgcatatatgcttctctctctctctctctctctctctctctctctctctctctctcacacacacacacacacacacacacacacacacacacacacacaaatcaaaacattaaaaatgcaacaaaatatataaacaagcaagcaagctcttgcttacagtaggaagccaataaacacggaaaaagcaatgcattgacaagaaaaaaataaggggggaggttgatggctaccggcatcccatagtttcaagtcaattgttggatgataaacatggataacgtctgcaaggtgtatttataatctaaaagtatcccctcacagatgcttattaattagcaaatactgttgccaagtaatgtgatgttattttacaaaatgacattaccaaagagaaacttggcaaatgccagtatgattaaataaccaaagtcaacatcatcagaaagggcacaagggacaagtaactcctactgagctcaccgagaacaaagtaccccaactacggtgacagaagcaagcatcctggaggcaatcaggaggatcaagtgaacccagaaggagcgcgtacgtgtgtctgtgtgtgtgtgtgtgtgtgtgtgtgtgtgtgtgtgtgtgtgtgtctgtgtgtgtgtgtgtgtgtgtctgtctgtgtgtgtgtgtgtgtgtgtgtgtgtgttgtgtgtgtacgtacataagcatagacatagttgtagatctatcatgccattatcctgggtatgactgtgaacttggtcacagcttcacattaaatgatggaaaacatgtgttgtgatttgaatgtgaaaagctctcccataggctccagtgtctaaacccttggtcagctgggggcgttggattggaagcctgtgaaacctttagaaggcagattcctgttggaggaagctggtcactctggcctggctcctatccctggcccccagctctttcctgattgtggattcaatatgagcagctgcctcacacgcctgccaccctgccttgcactgcagaaaggacttcctcaaactttaggcagaataaatcctcctaattttttaacaaaggttttatttatttattatgtatacagcattctgcttccatgtatatctgcacaccaggagagggcaccagatctcataacggatggttgtgagccaccatgtgggtgctgggaattgaactcaggacctctggaagagcagcctgtgctcttaacctctgagccatctctccagaaatcctcctattcttaagttacttattgccaggtatttatcatggtagcaaggaagtggctaacacagccagctctgtctgggctctgtccatgacagagatgtgtgaaatctgagcagaggttgaaaactagcttagcattcgtcttgtcatattgattacatgtaatgggagagaaagggttaaagcgaatgtggcagactgttgacctttggagcattttggtgggcatacaaaatatgggtttccctgtgacctttttgtgcatcgcacttgtctcccaggtgcagatttccttatgacctttttgtgcatcacacttgtctcccaggtgaggtcccctctgacccagtggattcacttctgctcttgtgtctcatggttatgcttgaattcatatattaaacccaaactcggcaatatgaaagaaaacatgtgtcctttgtctttccgagtccggtttactctgtgtagcatgtcaacctcctttggactcatttcccagcaggtgacatagtttcattattcacagctcactgagagctcatattttctttactgtccatctgtgggtgggaatatagggtggtaccaccttaaccatcattaagtgccttggtctatggggctaaacagaaactaaactattatgtttctgtcaccactaactaccatccatctccagaaccttctcatagtccccaatctgaagctctgtgcccattaaacactggcttctgtgccctgcttttgatcctcttgcaatgattttactttctgcacctctgacttggttcacgtatctcatatatatatggaatcagagaagccttgttcatttatcttactgctctcaaagtcatccctagcgcagcaaatatgggagtctacttccttcattgaggctggatgatactccattgtattgccttggtgtatgtgcttgaatgagcctgtgtgtgtgtgtgtgtgtgtgtgtgtgtgtgtgtgtgtgtgtgtgtgtgtgtgtgtgtgtgtgtgtgtgttcgagtgcagtttgtgtatcaaatcccttaatgggcaattggctttgcacaggttctttgaaataacagttaagggatgaggctgagtagcccaagaattgctgggtggatgatttcttagctggtggagcagtaagtcctaagagttccttaaggcccaattccaacactagcccattgttttccaaagcctggtcttgtttgccaaggagtgggccaatctagtgtctgcttccacattacctcagctacaatttatctcatctctctattgtgcctccttccaggctaccaaaccatccacacctctcccatcaaacctttgtctagctaacagctgcaaacaaattgtggggtctgtggattgaagcttcacaaactgaaaacgatgggtttgaatttccttttactcttagtcccatccggaagaggagataaggaaggagatgaaaaatgaaaaaagcatgtgggctggcagaggaaagcaagctaagggcttgtggcatctgctagttaagctcggtatttggcatccggaagggatggatattggagatcacctagaacaatgctcttgcgttatccaggggtaaaaggctttatgcaagtttcagagatggatataatgtggctggggcaaagtgagccccaaggcatcctgggaggtggtgcagacatgtttttcataccccttcctcttctcctgttgctggggccctgacatggagaagtgcttttattacttcatgaatggtcagtggattgatgacctagaggggccctcacagagccctgcaagtcatgctagctgtgggaacctcactttacttcaggttttggctgggaggatacagggtccagccatggccaccttgtctctaaggggttcaacagggaaagagagaaggttgccaagctacagctccaatgcaccttctagttctctgcatctcagcctccccttggttataccctcaagacagttctgtgggtagcctgcttgtctcagaagacacatggatgccgagtcctcttcctgcgtatacttcagggatgtacattcaaaactgactgactcttgggctggggagatggcccagtcaatacagtgctcatcttatatggtgatatcttgtttgtgatctaataaagcaactggagatcaaaatgcaaagctagccatagccatagagccagactgtggtgatacacgactttaatcccagcagccacactagttagccataggggccaggcagtgttgacacacacctttaatcccaggactcaggagacagaggccagcggatctctgttggttcaagaccacactgagctacacaaaactgatccagtgtaaaagagaaacagctcacacaaaggtgatctcagcatttgagatcacacgcttttaatcccagcactaggaaggtggagacaggagagatatggctagacagagagaggaaataaggcaggagaagacaggaactgggaggtttgcagtcgaacagtgcagtctgcattgcactctgaggattcatggagacaggatcacacattttagtaaagtagaggtaagagctagcggctggctgttttgcttctctgatcttcagcttgaacccagtatctgtctctgggtttttattatttgtgttatttcttataagcatgaggaccagagttcaattcttggaacccatatttaaaaaaaaaaaaaaaaagatccaggcacagtggcacacacttgtaattccagtgctagggaggtagagacaggcagatccctggggctcactggatccccagcctagctttggtgagtcctaaacatgccccgactctgtctacaatggcagaaccacttcatcccctccacaattttctcagtaagtgttagtttagaagtaaggtaaagccacctggtcaaagacccagattgtctcttttcctttgttaccttaggagtgaagggtaagtcaagttatgtatggtaaaatgccacaacacacacacacacacacacacacacacacacacacacacacacacacacacacattttcacattcaaatactgacttagttatcatgaagctcgcagtcttccttaaccaaagcctctggaagcctggagtccaccattatctctgtacagccaggtgtactcttcaggagcagaagattcattttcctgttggaaacaatgaatggagttgagatcctgatttatgtgggagctgccgtaggctgccaactccgcgtttttctctctgatccaggatagtatctgtttctaaacaaaaccagccaggagcactcaaagagaaaagcaaaaaccaagtagcgacttcggctcaagagagaaaaatcttatctgccggattgtgctcttgaggtcgaagaggaaggctggaggtcacacagactcttcctgagagatctacagtgggaaatgtcagcgggaaaaggggaggagggagaactgtcaggctgttgcaggggtgctgtttgcagagaggaggggtgagtggcaggctgttgcaggggtactgtttgcagagaggaggtgtgagggttgggcaggaagagtctgggacttctgcactgttttaagaaggattactgaagatgagagggacctgccaaactgaattgctcttggaaggatggggctgatcctgcccctaccttgctaggtgactgacaagctcccaggaagcctgactctgagacagtgatgggtgaaactggaggccctggctattttgttctctgcagtgacgatctgagggtcacataggcgcagctgacatatctgttaatggcccttgtgcaaggcattctactcaaaccagcagcagtgactccgagatggtccctaaggtcaaggacaaaatgtcctgtgattgagccagggccagggctcgatgttggtctgaagacaagtgactctgaccccattactcctgacattgaaactgtgtgtgtttggggtggggtgtggatcttctcaacagataattctttactctccagacactaacaaagtgtcctatgttttaactcctgacactaaagacctagagtttgggcacagccaagagacaagcttcattttaaaacagtggcccagctctccataccagccacggcggctcatcctcacaaacatctgacttaccggccccagaattggcgtcagggtgcgaatcccaccatcccgttctccaagttcaatcatttgcttccacagctgtaagaactcggggcaatactatgagtatggttgaaatgataaatgccccacataggctcgtgtgtttgaacacttggtctccagctaacaacactgtttggggcagctgtggaactttagtaggtggggcctagttgggggcacacaccctaaggattatggagccatttttgtttgaactctctgtttcctggttccctgagctgtgagccagctctggcctacactgtcagtgcccccattgactttacttctaataatcatggcaaccctttgcaaagagtataactgtgttctcatgctgaggggcaggaaggctggcatgccatgggctgcaggagaaagagcaggcaacagtcattaagtctcattgcgtgaatactgacagcctccaccctgagagccctgcatagtcacccttcccttagtctcagaagagaaataatttcaggctgagaaaacagataccgaagtcatccagtaagtggcagaacccaaattgatctgagacctgcctgactccaaaccccacattttgtttgtatctcctgaaaaatttaatgccccggtctggggttaaggactgccatgtcttgtccattcctcagcttgctctccctggaggctacttcttcatggttttagccagggcccctcccattgtctcttgtcctagcctcagccccacacaggcttgtttgtgtgaatgaacccctggcaaaggggaggaagccccaaggctgataggatcactacaatattcattcaaccaaggacttgctagctagctagcttcttgtacctgccagggccagtttgttatttgtttgtttatatatttctgtctcggtggcactggtgtccagccttggcagcatgcacgttaggcgagcacttcatcactgaactctatccacagcctttcgtttctattctcagacggggtcttgtgaagttgcccaggatggccttgaactcactttgtaagcagcccttggactttcaatgccccagcttcggattcccaggcagcttttgatcccgccatgcatgacctggatgtcaacatgttcctattggccagggttgattttgtgaatgaacacctcacaagagtgttaaagccatctcaagagtgaccacaccaaaatctagccctagccagacatgactacacactccagcgtttcagttattaaaacagcctcatccagcaaaactagaggaaattggaaggataggaagaaattctggttgagtcacatttaactgcaatgaagaacccagcatctctaacaagagaagaagcttttccccaaggttgaagccaagctccctcggtggcaaaacttgacctatttatagtctttgtttatcctcccagtatgaatatttatgtattccactgttgaggtattaacaagttgattgcagacttgccctgcactctacccggggttgttacataatgtacagtatgggagctgaattaactttctcaaatcagacagattgtgaatcagaaccacacctcactgcagggattttgcataagtaagggattatcttcctgagttctgcatcaatcagtagattttcagatagacacaatcaaccaactcaaactggcttaaataataaatatatactattgcatataaaagagaaccttagacatcgtatggcttgacatggctctgtcctttttcttgcctctactctcctttgtctgttggatttgtgtaagattatctttattcattgcagaaaagaaaaagggaagttccaggcctcatattgacacctgcaaagctcaaaacaagggggacactgttgtctgaacatttccaggagaaaggtcccataacccccttaaatggccacatcacacatgctgggggtgggatgagattgtgaattacactgattggttttgtctagagcaaacttgttccatttataatagggagaaaatgatctgatctgaacctatatggaaccccccaaatcagaagtaattgagaggaggaaggggaaatggttgtcagaaaattgatagccacctcatctccttttgctgtttatgtcacacactagagagatgctacttcatttgaaccatatttccagcagtaacaaagatgcactttctttacatcattagctttccatccttcataatgccagttgccagcaaacttacctaatagcatttatcttgtttattcttttctacttcatatcaatcatttgtgaaaacatcgttaacaagcctgagtacctgagttggatctccagcactcacataaaaagtcaagtgtagtggaatgtatttggaaccccagcactggggaggcagagacaggaggagccctggggctcactggccagctgtccgagccccatcagtgtgtcttaggtcccaatgagagatcttgtctctaaagccaagataagaaacacttgaagctgacctgtgtctggatgtacacacacacacacacacacacacacacacacagaaagagagagacagagacagagacagagacagagacagagacagagacagagagacaggggaggtatacatgtgcttgctagggcatgagtatggaaatcaaaggaaaccttgtgggagttggttctcgtcttccatgtgagtccaggggaccaaacctaggttttcaggcacagccacagcacctttacctgatgagccatctcagcagaaaacacactggaaattcttgagctggggaaggcttcataattaaatgaaagacctaataactcaagagtgtcaacatagctgtccttctttcatctctttctgtgttcccttccgagactggcttccttgtggtagctgggtgactgcagcagattcaggcatttccattcgcaccacactgcaatgtttacaccactggaagtggaagaggccaggcaggggggacatggaggcttcacaacagcctggtgagacccttcatagggtcagggctcagtatttctaaaaactgcactctgttcctttctagggctactgtaacaagggaaggggggctggtagcttagacgacagaccttattatctcacagttgtaaaagctagatatacaaaaaccaaagtccacagtttgattccttctgaggactgtgaaggggctcctcccggctttaccctatggcctgagggcagctatgcttcccctgcaaatctttccgtcatctcctattcatatctgactctttatctacaccctccctttttgtaaggacatactgagttagggactccctgtactcctatgccctcactgtaacttaattcactccatctgcaatgaccttgtttccaaataaggccacactctggggtaatggagcttaagatgtccccacatgaacagggagcggggatataatacagccacagcatgtgaggtcttttttcctatgaagtaaaagcacggataaggcttttaggagcagctactgaaaaagaaaaccagccttcctccagcccacggcagtgacaggcagcagcacggtaagccccaagaggttttctcatcatgctgccatctctgtctgtgatttctctacatgggctctctctggaaatcatggcctaattggctcttaaggtccttctcccctcctttggaccttgtctggttaatcctcctggcacctgctggaaggtgggacttgactgagaggacaaaaatctcaaggggtttaggataggcatgtcccagaggagagacttctgaagttgcctagatgtccagaatattcaggattagacatcaagggctacgtgttcagggccatgctgattgaaaaccctagtggggaacacattctctgcaagcatccattgggttgtagacataacaccacccctctgcatgaggacagacatttatcacatctcagataagactacaggaggcacaggctaagatggaatggaggccatggggactcgggcatcatctagctgtgcctaaggcactcagaggaactcctttgtcacccacccatacctgctatgtctcttgccctttgctcagattgccacagcccattcactggctacccatggtctgtttctctacctgagatgcctggagagtagacagctatatgcagagcatgaccagagcatgcttgtgctcacagcacacccttgtgtgtatgcacaggaggcttcttgcaatgcatgtggaagtcaggatgggaaagaggcaggaacggattgcgagtctagctcacagcctggaactcaaaacagaccaagaatcatcagtttgagctggcttctcgggtaggcctgttggttaggcagcaggttagaacacaattgacttcgtgatgctttggcttgactcagagcatttgactgtgtagacatttctccttttacagcgggccccgcagacattagggatgggccaggccacccagcctcttcccgctcctctgagctcttgtggtgcgtgctcgactttgatgctttcttttccctttcagggccatccttgatgttaattttaatcttttcccaacagcatgcatattgagagacaaaagtgtgtgcagagggtgtgggtgaaggaggggaggggcacctgacaggatcactcccgcctgtacatctggaggccaggctgctaggactcaggaggaatggctggtgtttctctgagactatggaaatgagggtgggatactttgaagtcaggcagcttggtttcctagcaaaaagctgctctacacactgctgggcaagcctggttgttgaaagggctccaattttaactcctccctgccacaatgactgtagctcctcccactaagagatagtatatgtcccttctcctggatcagatcagagatgcccttgtgacttcctgtgattggtaggatgtgacagaagcagcaagctcagacctccagaggcttcccctcccccttccctcttcctccttttgctgccacagaaataagacaagacaggactgtcctataccaggcaatgtagaggggagcctggaccatgcctgcttcacacaggtgatgactgagttcagcttaaatgaggagagcgtgtctcagaccagcagaacaccccccccacacacacacacacacagatacacacatacaaataaatagaaggcctgattctgatacatactccaatatggatgcaacttgaggaccttgagctaagtgaaataagccagacaaatatgtggtttcactgatagaagatacctggaatagtcaaaaccacaaagacataaagtgggataatggacaccaaggaggtcagaggagactggaagttgtttcatgggcacagaattccaatttgggaagctgagaaggtcccagagacagtcacacaatactgtgaacatggcagcattgctgaagggtgccattagagagagttaagatgacatttttttatgttacaactattttaagacaattacaaagaaatcagctatgccaagcaaaccacgatggtgcgtcatctcaaagtatccatcgtagccaccaagataacaacaacaataataacaacaataataataatgctctgtatgtctctaagtgcaacgctatccagtcaaactgaagaggccactgctctgaacactggcctccaggcatcccaagcatatcaccatcttaataagaacagatgtgattaccaacatgagattctcattggattggccttcttagcattccctcaaagagagttgggtgagtgtcatccaacctccacctggcactaaagccattcaccaccacccccagcctgacagctatgtaaccccagatgcatgtgatgtagggaggggctgggcacataggagatgagaggttaaatgatgatggcattcatatgtcttcattaaggtttttatttctgtgatgaaacactatgaccataaagcaagttgggaaagaaaggatttattcagctttcacttccacattgctgtctatcactgaaggaagtcaggagaggaacccaaacatggcaggatcctggagggaggagctgatgcagagctaatgaggggtgctatttaccagcttgttccactcaacctgccttcttacagaacccaagaccccagcccaggggtcacaccacccagcatggtctgggccctcccgcattgatcactaattgagaaaatgccttacagctgggtctcatggaggcatttcctcagctgaggctccttcctctctgatgactctagcttgtgtcaagttgacacatgaaactagccagcacgccatccttgtagctttagggagggtgtcacgtaggccggattgggatttttcaccggtgttcctgtaagtaacccctcacccttgtcctgtagtgaagctcagttaagtcacagattcaccccgctggacttaggtagacttctttctttgatctgtggttttctctctgtctggggtaagtagacgactgctcaggtctcctcacgaaagttaatgcaatgtcatctataacgactgaagtcagcaacgaaaggctaaaacacctcacttaattatacaataaccctgcttacctggattgtcagaccttatctgggaccaactgagtgaaggaaatgggaaataaagaggccacttttgaataatgaatctcagcatttggtgggagaggaacatgggtgaacaactgaatccagattttttttttttcacgacaagctgtttggtgcacatgatgtattcagtaagggccctggttggaatccctgaagaaaaggtttaggggtattttgtttgctctccatcaaagaacaaaaattaaccacaggtgacaactaggcaaggcgatgacctgaaacactgaggcacctatcatggagacctctgcaaatctaagcagtaatgatagagtctctacaacatgctggaggaaaattgcatccttggctggttctggaggccacaagatgcaagtgaccatggctctgttcacagggaagccttggtgcaaacaagggtgcctgtagaactgaatttcctgctgagagatgaatgggatctaaggaaacggaaactgcatggaccagtcagtccctggtcctctctaaataaacgccatcattgtctcttctgatgttccacactgcagtgcatggtctgaccagaggcgggattgtcctagcagcttacaaataaaaggaggggatggagattattttgtacattgttcacactattcagacagtctacagagtagctagtaactttaaaaaggtttaacatcgtcttagagcataagattgaaattaattaaaacttactggatctgcaggaagcataaatgtgtatggacagcgtatatgtattcaaaatgaaaatttaactttggacaagtggagctaatatgatttgtgcgtaatattaaattagaataatacatgcaacttaaaagcgattaaacactgacgggaacagctgtgtgggcttgaggaaacgtgttcttgttgtttagaagtactcaataagggccagtttgattgcattccagaatcatacacattaccagaagatagtatgttcactagaggaaatataggaaaggcattgccactggattcaaagaatccccccacccttaaaataaaatttcaagaaatcagatcatctaaattctgactgaaagagaggaagtcttggccagttgaggaatgtgagctacaaccctgccttatgctgaaacaagtgtgtacagataactttactttcaaaactgattgctaaaatcctggttaagattcctctgcagccacttggtacaaaaactctggtatctaaagaggtttgcaaatgcaagcatacttctcaaactacttttgaaaagcaagacttctgtgttttatgttctaattgtaagaatataatggaaagagaaccccaatgtaagtaaccccaataaattcattggttcaccaagtggaatcattatttgctctatattgtttccttatttaggatgaggagactttgctcatgtctccccaagaaagtcatgcactatttccccaccatgacaggctgtaccctaaccagactagtgtaggcttttgacacctcaaagccaaccctgagtaaaacatttcctccaacaaagacacacttcctaattcttctcaaaattgcctgatgactaagcatccaaatatatgggcctatggggtgtgttattaaaatttttattcttctatcacacattataggctaccacagttccccacacacactcctctcagtctttcccctacctctcctctcccacaaatcaactcctcctccatttcccttaggagctggccttccagggagatccaccaaatatggcctaacaagatacaatgtgaccaggcacactaggcacaaaccgtcatactactgctggaagtggcaacccagtaggagaaaaagagttccaagtgcaggcaagagtcagagacacccctactcccattgttggaagtgttaggatttagtggcagagtaccttggcaggtataggccaaggtatgctgaaaatgtcataccacaaaacagatctcatttgagagatttattgggggggggacatcgaaaggccattttggagtagagatatgagagagacagagacagagacagaccgacagacacacaaacacacacacacacacacacacacacacacagagagagagagagagagagagagagagagcgccatgatgttgagagggacgttttaaagggtatgtgtgtcacttagggaaaatactcacatagcaacagtggaaatgcaccacccctggcaggggtggatgatgacgtgtctgctggctctgagtccctgaagggcaggctggcaggcagagtgtcggatttctaacaggagccccctaagaaaaaaatacacaacataaaatacatgaagaaggcctagctcagacccttccaggctctgtgattgttgcttcagtccctatgagccctacttatttgacttggtggcccatgttcttgtggtgtcttcaatctttttggcttctacaatccttcctcccactcttcttgaggttcatgggggccattcttattcaaaccaccacaggaaggagagtcaagacaagaactcaaggcaggaactgaaggaacggctatgaaggagcactcttgactcctcatggcttctcaactatctttcttatataactcaggaccactgtctcaagagtggctcggcccacagtgggctggaccctttccacaccaatcattaatcaaaactgcgtcccactgtgttcccctgcctggacttgaacttgcaaccttccctcatgcgccacaggacaatctgatggaagcaattcctcagttgaggttccttcttcacagatgactctcgctctgtcaaactgacaaaaacaaaccgtatcagcaacagccaacacaatcccatttaagagagttccctttgcactacctccttaatgatacttagggttgtcaaaccttttaaccaaaggcatcccagtgggcacagtggaatctattatggttttaatttgcacttctgtaacaagaaaggccaccgaacattttatagactctttgtaaagtatctattcaggactcttgcctacttaaaagtttttttttctctgtgtgtttatgtgtgtgtggggatgtgtacatgtgtgtacatatttgtgtgtatatatgcatgagttcacccatatgctcagagaccagagatccacactagtgttttcttcagccactctccaccttattttttgagacactggttattggctggctttctatacacgtgctcaagattaaattcaggttgtcaggcttggctacaagagccttcagcaactcagccacctccctagaaccatacttacttctctgaaaagttagcttgggttgcctagtttttattttgattggaagatagacactttaaatattctctggatgagttcttagacacttactctacaaatacaacctgctggctggagagatggcccaactggtaaaggctctttcaccaaacatgatgagttgagtttgatcccaagaccccacttggtggaaggaaagaactgactctcaggagcaagatacacacatgatagataaatggatggatagacagatagaaagatagatagatagatagatagatagatagatagataataccattcgccaatctctgtaccttaaggttttctctctattaatggcttattttgaagaatttaagttcttagtataaactttattgttatgactaattcattttaaaaattgtgttttcctactccacattatgaagctattctgttgtccttctcaagaagactgtcggtgtatcattcatatttatgtctctgacctttctcacagtacttttgtatattgggtgaggtggagggtcaaggtgtttatttatatgtatttatcatgggtggccatccccttgacctagtatcattatggaaaagcccatcatttctcccaacggagtctccatagtgttttgacttccatcagtcaatatataaatatagttatagatggatatagatgtaagtctgctttctaaaactcagttctgtaccactggtctattgctttatctgccctctcagacagcatggaagaaatgaaatttcagtatctagaataataaatcctctagacctgttctttttcctctaagatgtaccttagctagtttagatttcttttaatttcattcaatcatgtaacttctagatcacatgtccatttcccataataagcctcctataaaatccttttccttattcttagtgtataatcctccctcccaaagctctcccagggcatccactggaagcttgcagtgtgcaccaaggtcctgaggcttccaactccagcctttgctgtctcagcacccacaagagctgaaatctctgcttagctctcgatactcccagttattatttctgcctgtgttccacaccgtgtagaagtcaccagtggcttgagaagaattaggctgtggaccctgggggcttcctctccgcagttctcttctcactgggtattttacccttaaattcccagttgaaaggttcaggcattatgctggcctgcccctgttacctggtggaatccactcaggcaataccctggtcagcccaaggttccatgggaaagaagtctgcactcaggtgcagaggacccctttaaaagataggctcctgcccctttactccctctctctctctttcactctctctctctctctctctctctctctctctctctctctctctctctctctctctctccccctgtctctctctctctgtgtgtgctctcccgtctctgtttccccgctctgtctctctatggcgaccggccatggcagtcagccattacccctgttcctcttcttagtctacccattctaccggcccttataataaacttatagtcttaagtctcatgtctcagcaatttctcttttcttctttttaaacaaaacaataacattttggcgcccgacttgatttaggctctctctgtagaccctctcccaaagctaactggtgggatagtttttctttctttgtaacttttcctgccaggagcatgggaaatctcggagatcctaaaacctgaactcatagcccacttccatctccacttttcctggcactccctcctgcctgcagcagcctgagatgccggaactcaacttgccgcttttccaactaagtatttctggaactcactgatctgcctattcgctacaatccggtaagatacccagaccaattccatggggcagacccagcgctgttcactctgggtccattttttggttttgggccgggtgctctcagacagggcaatctgtacatttttcggccttgcccacgggaaatacatttttacgggatctttcggttattggcagcgaataggtaaatgagcagagttctgcctcccagtgggaactttctttcacctgggaatgtccctcattgttctgattgttctatttctgactgtttcttcttggttggcaatgtctgcttgagatgctctgagagttttgtttgtctgctggttttcatttttccacatgaatgaggtttgaaacttttctggcaattgagaatgtgcttacgggggtcgccatcaaccatgtgggctaacctgggggccgccatcttggtcataaccaggtgacctggcttaggcctacccactcagttcaatgacttccacgggcaagcactgccacctgacatcttgctttttatttcttctttcacttgttgggtgcatttcctaaaggtcaggcatgggatcccgctccaggagcggtgcttttttgcttttttcagttcggactgctgggtcctttttcggtttcgggacagctgtgtccccttcggggccaggcccctggcaactcccacgggcagacgtacatccatagaggagctttttgccggttctccatttgcctcacccatgggaaatgcatagaggaacctttctggtttcatccaacaagcaggtacggttgccgccattttggtcatgtgacctaactgtaggcacgcacagctccagcggcctagccagtaaacctgtctgccggatttttgatttctgccagatcattttgctttttatttttattttttgtctttttcttctttcactggctctgttgttcatggcttttttactaaatactgtgcctttccagggccctctgtttaagtctaccctttctctttaaatctcctgtctgtttgctacaatgtacggatcagagattacattctgactccccctttactgttatccagtcctgcttgtctctgtacctgtaatttaactttatacttatccagctctatatgcaatttaaattaaactatactaagtctcatatttctaaattgctatatatctttaaatgatgataaaagtttaaaatcataaaggtctatttcaaattaacaaaatatttataccactcagtcttatcctataagccgtttacaaaggtacagcttttattacaaaaagggatttttctctaactaaagacaaacttaactactaagatcctaaacagacagccctcaaatgctcagagatctagagaatatggcatttaaaatgttttgttaaaaagctttttataacagagagataggccagctgctggccttaccccatttcctccgaaaagattgatgggcactgaagaagcttcatctcgagtcagtgacaatgctggtcactgagcaaccctgcccttcacctcaactggtacaaagtattccagaccatggacaagaggacaacggaatcgactttcccggcgttgcttgggccaacggtaggcaagtcttcccaaagtctctaatccacaggtcacaagttatcagcaagaaggcaggtgtcctgcagcccactacaatggagggaggaccttggggatggctgtccatacagcctgctggcaagtctctgttattctttaatcattgattcaggtaaaatcttatccttctcaagaactctgatgcttttgagcactgatagtcttgccggcttaaagcaaaacagattccaataacaggtattttagggtttatctatgtgaatataaaaaagtctaagatgtatgaaggtctgagaatgtagttacaaaggcctgaggatataaaggcgtaaatgatgataaaatgagttgagacattaaaaagaataaaaaaatgttcctgatttctctatttctcatgctactgttcatagtctacaataccactataggatcataactacaaggtcaaggttaagatgcttttcattgtcctaaaaaatctgtctgttttaaaatgttaatgctttcagccaagttgcttctaacatgaatatgcttctaacatgtctaatacttatgtttccataaactctaaggattcttgtaagttccagggagccgaatcagatccaaacaggtcaggttcactccaggtaatattcaatctttccctggtcccaaattcccttcactcatcttgggacacctcgggaacccctccctcatcttacaatcttcccctcaaatgacaggacctaagaaaaatttttttctaaactcaaccttgtcttctgctctgtcaacatcttgccaggtctaagaggcgccagggagttccatacagcctggactgcaatgaaacaaccagcttccccaggacgtggcagcaccccaaccttcttgggtcccccaaagatggtcaacgccccccacgtcagcaggaagcagtcttaagaattcgacgcccttattccttaacctgccatgtctaaacaccccacctttttttaataataagtagaggtgggaatgaaaggttcaggcattatgctggcctgcccctgttacctggtggaatccactcaggcaataccctggtcagcccaaggttccatgggaaagaagtctgcacgcaggtgcagaggacccctttaaaagataggcccctgcacctttacgctctctctgcacctttacgctctctctctctctctccccctgtctctctctctctctctctgtgtgctctcccgtctctctcgtttccccgctctgtctctctatggcgaccggccatggcggtcagccgtttaccctgttcctcttcttagtctccccattctaccgggccttataataaacttatagtcaatatgtctgtctcaatatttctcttttcttctttgtaaacaaaagaataacaccagtgcattggacaccctgactctccccctcaccttagtcaggtagcatgctctgtgcctgctctgttctttagaaggagacgtggagtggctggattttagcacattgaagtggaagcacatgggttgcaagttcaagcccagctgcggggggggggggcatagtgaggcctgtctcaaggtgaaaaaagaaagaaagaatcaaattgctgagctgtgcagctgggctgatctcaaggatcatggtaactcaaatccctgatttgtaccctgcccagggtcattaatcagttatattccgtccagctcctttagttgtttggatcaaaggacattagtctgatagaagccactgtgtcatgattagagcaagagtccatggtacttttattgtttgcttcatacaatggcccttgaaagacatgcgtcacgcatagcctcatctgtttagccaatggctctctctcagcagtgtccacttgtctgtcctctcggctctcactccagcgcccagagtctgggtgctgagtggaaaagtgagaacaaggctctatttggctgactcacctgtggccaagtgaccaagttgtgggaggaatactacagactctcagaatatgcatcctctgaggctatggaaaccattcctaaccctgcacgggacacccaccaccaacacccaccctccctggcttcgcccttctgcccctctgctcagtggggagcatctcagtgacctctgcttcaccccacctctcttctgtctcatcagctgcctggggctcagtgtctcttttctccatcattgcagctccccttacaactgtcagagcaaagacccagaagtcccctgattctcacctttcctgagtgtgcagccccaaatctcaacctcgggtacacacttccggtgaaggaattaaaaaccccgcctccctgttgccacctgacaaggtctggttctcagagaatgttcaaggcccagaggtgcctgactccactgctccctatctgccacacacaccccaaatggaccactgccctccttcttagcgcaccacacccgtctctcccttgccttttatccacagcgtgccctcttagacccctaactcccacattccctctattctctttggccatttatcttcagaaaccctgccgccactttgtctaaatgtgttgacatttctttttccataccacgaaaccactataactctgttcttatatttctaaaggaacatgagattctaccccacattatataggagcaggcaagatggctcagccaatgaaagcaattgcctcaaaacctgttgacctgagtttgatccttggaacccatgtaaaggtggaagggggaaactcctcaaggttgtcatctgacgtccacaatttactgtggcattcgtaccccgcgtacttacattataacaaagtaaaacactttaagtaaacgttgtattacgtcacccaccacattgtgcacacccagcatacagtcttagccatggtgtgtttgcagtgaacatcagttggctggattactggagaagccacagaggtccaaaagtgtgtaccccgggtctcctttgcctcggcatcactgcccatcatcggaggggcccccctagagttcataaaattggagcattttataagacatgtgtaatcgctgggagtcttcagaatttgacttggggaagaagaacttactcatcagagttagtataaatatgaacaagataaaacagttcacaccactgcccaccaccactacaagacaaataattttagagggttcctcactgggttttcagcagccctggtcgatgttgtctgaaggtcactcatgactcttattttatagggatagcctgggaggagcagatatgagcagatcttcctgcgcctgcccacccttaggacttgtgcaaactgctagcacagccgtctcctttacacagcttctcatgcctaccgacgtcctgctgtgtgaatacatctgtctttttgtcaccccggggctgtcatttccagactctgctctaattattttaagcaccacaaagccctcttgaacaaaacagcatagcaattaattttcccttatcggagaggaggtcctgatggatcctctagccatgagaggctctgggttagggaaaagaaagggatttgaggactctgctgtcgtggctaagccttcttctcaatggaaactggttttcttgtccacagacaggtatttccttggaatgtacagacaatggagtccatcgtcctcaggcagagttacaatggcggtaattattcggccacaagtcggtgtaattttcttctccttacagcatctgtatgcaggcaggcccagaatgcaaatgatatgaccactttcattaaatcatctttttatgactgtataatttcagtaattaaaacctttactaatatattctaccaagcaggcagaatgttacactaatgtatggcccttattaatttttgaaaaacaggggtgaaatttgaataacctgcttctgtacacttaagagctctgaaaagaaaagggggaaaagaaacaacaaaagaagcctaatataattctgattaatgcaagctaattagcattcattgtttcttattcccccttccccacctgaaaagtcacagcaaacattagccttgcctagtacattagtattagagctagcattcctggtacatattcaaagcctatctttttctgggttcttatcagtttgttaccagagagagagagagagagagagagagagagagagagagagagagagtagtctgtagctctttaatcatcacaattacgcagtgatctaaacatcagcctgctctccataggtcaaagggtttgttcaggatccaggtcagttctcagttcagcagttccggaaagttctagaactcttgttccttactccccagcaaaacctagctattgcttaaagaacattgattgtactggattccttaacgcacccaaaggttcctgcaggctgaatcactgggaactcaaatttagaatacaaatggcttcaattagatctgaaagtgagcccggtgcaccgtgcccatcttccacccagccagagaggtcagaggttcccactttatagtgacagcctcaaatagcacactgggatatatagtgactgaaagccatttaagtcttagctggaaaaacagctcctgtgtgtgcgatacaagcaccagcactccaactgaaaggggaaactccccagtgtgaactaaaaacccatctgaagacctccagaaggggctgtcctgtgcttcatcaaactaggacttagtgtggatttgtttatgcaattttgacatgtagattttcttttacacatgagtgctggaacgcaatacccataaaatttaacatcagctctaattaaatacaaatttattattattaaatacaaatttaatagcagctttctttaacaactatttctgaacttttaacaggtgtcaggcccatgctaaatgcatgacccagagacatcaatagccccttgttggacaaaagaaggaccatccatctacattctgcaagagctggctctaaaactctgtcgcagtaccactttccaacgctgcctttgggtctaacactcacgccaatctcagctcatgcccgcaccgtgcactcctgcttgcagatcctgcccctggactctgcttgtctaacaccttcccccttcagggctcagcactgactctgtctcctcttgatgtcttgtccagataagaggcttctgcactggccacctattaacatcttggcctggaagacacttgttgcgcttgacaaggaagttgattcagaccacgataaaccagatcccagctggcctgggatttgctctgcccaatctttgtccatcactatgaccatgatgagaggctatttcaagtattgaaatgcagcgagtcgaaccctgtctctccttaggtccagagggctctattaaagggttagcaaagttatctgtggaatacatccctgtgttcagcacagggtggtccccccaaaaaagaataacaatgctggaaacactgtaatatttccactggtcccagtgttccttgcctaacagctcaaagacctgaagatttggatcctcatctgttgtgccaacgatgccagctcagagcatacacggtgtcacttgacctttcctgcccagaagcttgcatggtgaagagacagtgaaatggtctcctcactcctgctttgagagctgctgacatttgtgtctggagagcttccttctcatcgctgcttcttccctttgttctaactcagctttcctcagacttcgggtagctcctcacatataagctctccccagcttggcaatccttatcacccactgactgtacttgtgccagttcctggtgggccaaagccaaggctggaaagagccaggacctctccctttctcttctcctggggctgctgtatcttcctgggtgctgactccagtcctcctgtttgccttgctctgattccttctggccacttggcccctgctatgctgacttttgacatcgccatttacaaagcagttcacttggcatctaagcaccaggcctcacctgtgtgaatcactgctcacacctgtaattcaacgcccaacttcctgatgtctcttattgctctgctctgtccatctcttctggctgaggcttagggtacttctgttcttactagtggtccttactacacccatacccaccaggggcatcccccatacaatgagctttctctttaggtcgggtggtccccatgtccagtggggcctttccttaattcttgtgtcctgtttatcactcccagcctcctcctgcctttgcctttaggcatttaagagaataatccattttagcttctccccctccctatattcactcactctattatccagattattcctgtctgacacctactgtgagcaggataaagagtccattagcaacactgtccttgtctccagtggaatagagcattaactctacttccttggattccaggttcaacataaatacttttccgtacacttactctaggaacgagaggttagtacctcttattctttagtccagctcttagccactataagtagttaaattgtagtgctggaactgtttcctgaataagcagagaaatatgttcaattagtgatgtgtgctgtgagaatatcagaaggaaagcatgtcctgtaagcaggacatgctgtttgccctccgtgtgacagagctacttcagtgtgatgatttgaatgagagtggcctccatgggctcatatgtttgaatactcggtctcttgttagtggaactgtttggtaaggatacgaaggtgtggcttcgttgaaagaggtgtgtcactgggggtggacttggagctttcaaaagactcaagctattcccagtgtgctttgtgtctcttccttgcagttagagatgtgagctctcggctgttcctgctgccaggcctttgctctttcatcatggactccaaccctctgacactgtaagcctaattaaatgctttcttttgtaactttcctttgttatggtgtttcgtcacaacaatagaaaaataaccaatacagcagtaggtaccagggagtgagctattgttgtgacagacctgaccatgtggcatttggaggttccgtgtctccatcatctggagcactgtgacggattagggtgctaaagcactgagggtgaagtcctgatgcagtgtgatgctccacctggaaatgttatggagataaagttgtgactgtggaaggacagaaacgagccagaactcacatgtagatgctcttccacacactgcctgcccaagcgttctttctcatcattgccatcatgtccaaacaggcctctaatcttgagctgtctcagggctctcaccttctggtcatctttattcagtgagttcacccaaagtcgtgactttaaactttttgccagtgactcccaaacttacagtccgatgtctaccggaaccccgtatcagcatagccaagtgtcttcccagtgtctctacttgttcctgttagagaggcagagggacagggttgtgttctaaagaagagtaaacagacagcagccatacactaaaaatgtgcgaccttagcacctttggagtattggcccagtacaaatcagtgcgagcgggtcagccttctactggagtagaccatcatgaagaggaggtgagcatggaatcccaggcctgcttggctctgagccagagagggctccactccccaggttgcatacaggattgcttccctggtaaccctcagctagcctgttgccctcagctccccctctccagtttctgacctgatgtggctaaggctctgtattgtcctaacaaccccctgacaggagcaaccacctcaggcgtcttgcagaatgtatgtgtgtggtgtggtggggtgtctgtgaatgcatagcctgcatgccacatgcgtgaaatgctgtgaatatgtggtctgggtgtctgtttccataacagtggatgtggttgtgctgtctgcaagtgttgtgagtgggaggcggtgtgtgtgctctgtgcatgttggaaggacagttgtgagtcagtgattacaggcgctcacaccagctctgtgacattttgtatgaaggaattatgcgtaattagtcaggtcttatgagtaggcaactgctaggagagaaaggaggagaaacaaagggaaattaatcatataaataagttgccttatatggttgttttgctcatttgtgcattggttcttaagagtgctgaaaaataaaacccaagtgcagaatcaggcccagttagttgctcaacagtgtgttttgatgatgacaaatggcagtgattctagagacaggcccttcgcacctccccatgcctgcggcgcctttggctcttcagacttgagctctctttgtagcagcctcagcccacacacacctgcaggcaggccctctgggtctgttcatctctggaccctgccttccacagctgttgaggagctggctccagcaggtcctcactgagtatttgctctgacttgaaggatgaagatacttgcatggtcacattcacccttaggcctgtggggtcatcctcaccttcaccaggtcccaggagcacctccttctcctccatggacttcaggcttacacctaagaattagcagggtcatgtggtgatgcatacccatggttctagcactcaaggcaaagacaggagctttgccacaggtcagaggccaatttggtctacacagtgagttccaagctagccaagactacataatgggactctcaaatgaaacagtatctattttgggggatatggggacagggcttggacgacactcccccaatacccaagtgcacctgatataccttggacaaaacgtagttctggtctggctgtctctggatgcccctcccccattcctccccagtttgctatgtatatcctcaccccttagcaggtgagtctccactcccagaaccacagggttaggctcctggtgcctggtgctttctgtcttattcacctttaaacaggctcaagtagcccttgacacacagtgccgggttccaaaaacacatgccttgaataaataaaggagtgcctgccaaaaggacacacaccttccacaaccaaagtcactctccaagagcaggactctcctttcctaaaaggcggtgaggccctgtcgggactgcagggatgggaattagttcatcacagaggcccaggccacaggatccccgctctttcctctcttccaggtgctgatcagcagctgatgtgcctgagagagccgggacttttcctttgcatttcaaatatgctgaagattattaattacacagctgttgttctccatcaatgtctttgggaaggggtggtcagcccccaggatgctcgaggcccaaggaaagtgtagttatttattatgactgcgccctggaacccttctccctggagcccatcacacctgtttgatgccacctcggatacctttgttctgcttttgtacgaggctgcacagctgggtctcccaccctgccagatgtccccatggagtggtcccatgggtggcaacctgcccccccaacacacacacacacacacacacacacacacacacacacacctgtgcctgccaggcccagcctcagggctttctcctcaggccaccctcccaccccaaccatctctggaggcctctgccttccttgtgtcccgcaactcctcctgttacccccaggctatgggtgcctgcatctcttgcctacccgacacattcctttagccaggctgcacagtgatatttatcaatgtgccgtgatgccataacaggccacgagcctgcatcagttacttttcttgttgctatggcaaaatacttgacaagaagcggctttcagtccatcatggtgtgtaaggcatagtagcaggtagccagcagcattgaatccacagtcaggaagcagagagacaaatgctgatgctcagctcacttcctctttatccagcccaggacacagcccatggaagggggccactcatgtgtttcgtgggtcttcccatcttaattaacccagtctagaaacttctcacagacatgctcagagtttgtttcctaggcaattctagatcctgtcaggttgaccatagcaaccaccaggcggcctgagctgtagacatgtactgtctctgttctggaggccaaagtcatcccctgtgtataaagtctagattgtatatctagtcagtagtggtgttagactgctacggtaacagaatgcccgagaaaaactaaaggagggaagactaactttcggctcatagtgtcagtggttttagtctctggccagatggttccatgacactggccccaagatgttacagaacaccatggcagcagggatgtgtggctgaggaggcttctcatctcatgtacagaaagaagggaaaggcccgggcagggtactcttgaatgacacactcctggggaccgcctttacttccaacaatatgccaactgcagtagttcctgatagtttattcaaactatgaaatcatcaaaggatcagttgatgaaagcagaatccttatgatccaatctcttcctgaaagattcacttctgaacgtagagaccaagtcttcaatgcatgacctttggggacacttcatacgcaacccatatcaccagccgtgttggatttgatgcatcctctccttatctgacagcatctataaccacccagtccaaatacagccacacccagagacttccacataggactgtagggcacacaattcaaaccttaagagcagctgccacagtaacggctcaatgtctaaattccttatgtggcatgcaaggccttccctaatctggcccagacctgagtttccagaacgttcctctccctcttctttctgtgtgcatgtgtatggtccccgttcaagtggagggagcagtcaggagggacagtgacatttgctgaatgttccaccaaatgccacccacactgcagttcttctctgggcatcatcacttgtcaccctcacagtaacctccccaggtaaacatcatgttcattttcaaacaagaaaactgagctctgagaccaactcactggtgatcaccaccaccatggccaaggggaagcctaaagctacactgaagccggtgggattctggaaccatggctcgggtagcttgaggagaagggatccactctgggaaggttggggtcagaaaggattcctgtggaaagtagaaactggaaagcagagtgagcacaaagaacaggaggcggtgttgagcgtgtctgttagggattcctcgcctggaaggaacatgttgctggaagggtggaggattctgagtctacaggctttcagatggcagggcaggaaatgagtcctgcacaggggacagaggctggggacacaataaatggtggagaaaactctcctggacctatacagccttctggggtctggagatagccaacgcaaccatgggatgaggaggactggagacgactttctggagactccattgtgactgatgccataagtaggggacattgtagagcatggtgctgacacttgggcaaagcataggcttcccagagagcaagcccatcatcaatgtagctatgtgacagcagtgtcacatagccaggtgtaaggaggacagagctaggatggtttgaggattgaacagcctgtggcctgtaggtacatgtgtcccagcatagctttggataaaagctacctgtgatggtgaatattgactggtaacagaatctaaattcacctggaagatgggcctttggacaggtttgtggggaattatcttgattgtgttaatttagttaaggagacctcatcgtgcccatcacgggtggtaccattccctgggtgggatcctggactctacagatgaagaaaagcaacagagacagaatggtccctggagctcactgaccagccagagtagctgaattggtgacttccaggttcagtgagaaatcctgtctcaaaattaaggtggagtacaactgtagaagatacccaaagtcggcctctggcctttacatgctaacatacatagacatgaatacacacacacacacacacacacacacacacacacacacacacacacacacacacaaactgttttcaagcaacccaaaggtcagccaagaagcagatgcagtggcatttaggagattggcttaatcttttctttggaaagaaccttgctcttctatgagctgtgaagacagacacaccgtctgtggtgtgtgagccagccggtgaccgcatggagcaggagagcttggcctggggccaggctatactgtcctgcctgcatgttactccacttctctgagcagccacggggtaatcagtatacctgtcccatgaggaggtgtggtgagaatcacaagagaaaagccagtgcttttccatgagaaaaagtcttcactaaatattagttaatattataaagctttcaaatcagccaggagtaaataatccctgctctactctgtcagctgtggccagggaaacaaagccttgtcagctggctcctgccttcaggacttcacaactctctgactttacaaccatgagtgtcatgagagaaataaaaaccaaatggtgtgggacagagatcaaatccccacccccacggttaagaattagaaaaaaacctaaaggtagatggtgcttaagtttgctcggggaatatgaagtctgcagctgacctcacaagactctggtgacatccttgagatgccaagccttaggggggttagacccacctccggggtcacagagcttcaaaaactatcagtcctctccatattcataccagaaagcaaggtagctctcaggttccctgctgggcaatctgcaagctttatttcttgtaagcattcccacaaccttgcaagtcgggttatttattatcggtcttggggttttgctgatctgaaaactgaaaaagtaaatgtgatgaatacatgaataaaggacaatgccatttttctcctcctttccatcatgcaaagatggcttactttccagaattattaaacctctttcagaaagtcacaggacaatatatatatatatatatatatatatatatatatatatatatcagattaaagcagtatgactcttgaaccatttagtaaaaatgaaaatcctttgttatctggagcctgtcttcatagtcattgttaccatgagttaaaacttgtattcacagccaggcattggtggcacacacctttaatcccagctctcgggaggcagaggcaggtggatctctgtgagttcgagaccagcctggtctacaagagctagttccaagacagcctccaaagccacagagaaaccctgtctcgaaaaaccaaaaaaaaaaaaaaaaaaacttgtattcactcagaaattaaaagaatggcccatgaacagcaatttctagagatcagtcaatggtttcaaagcacctgttatccttacgaactttaggtgactctgagtgttttacagtgagaatatctggtctaaatgccctacttcacagagaaaaagtcataaaatggaatgatggggaaacttctttttgtgttaacagggttcccaagtcctcagcagcattagtgtttgtaggcacatctatgacactccctgaaaggattgaaagtcaccattttgagacccctgagcagacttcagacaacctccattggacaaagctgtttatggacttctttccaattcatccaagcagcagtaacttcatttcaaaatcaagtctaaaagcaacaatagacgtcattcatataaaacacccactgcaatcttgtgaaatacatggttccattttctggaaattgttccaaatttaatccgttgttgaatgaacttctctggaggggagacatgaacaaagtggactcaccccaaatagggcatcaatgacaggccaaaggaatgattcctccaagggtccaacttggtgaacaagtgaatttgtttggcttacatgggtgaggtgttagttacaggtgtatgaataactccaaagcagcaacatcacttgtaagcatgagttttctgtcccaggagttcccactgcctttctctgcccccaaaacacacagacactatattaattatgaactgttggccagtgacttgggctttttattggctagttctgttttaattactaacccatttctatcaatctaagtatttccatatggtcttatattaccagagaaagagtacagccctgttactccttttgagtcctacgtggtgtctgctcagcatctccacagagaaaagaggaaagagaaaagagaaaagagaaaagagaaaagagaagagaagagaagaggagtgatttcctgtttgtccctgcttatattctgattcttcctagctacatcacttcctgcccgtctgtacagacctccagacctctatggttagctagtggcagtttctacccagctacatcacttcctgggaccacatgatgactcctctctgcctacatttcccagaatcctccttgtctcctagtcctacctatcatcctgcctgatatatcagtgttttattcatttctgtctaaataaaaaaaagggttttaactttaacatagtaaaattatatataacaaaacagttatcaagtaacaactatagttacactatttagttcattaacaattattaacacttaaagaaaatattctatcatatatgctctttgtgagtctaaagtcttatatataacttatctattatcataactaatgaaaccataaccatagctatctatgttcaactccatcaaagaccacagaaggataatatataaactctagaattgacagagatatctcagtatctggacagtcacctgaagttcttttgtaatgttggggcatctatcttcagcctacaggcctagtgtgtctggcagacttcttagagaagcaggaaattttataccatctgcctgaactggcagtttgtcagttatttttctctgtgtcttgcagaatgtttggcagattcttccatgaagcaggaacccttcaggactgcccatcttattttgcaagttcagcagggtcctgaatgtccagtttatacagaagcagtcaaacagtctaggcaagagcagtttcttgcccaaatggctagtctcaccatattgaaagcaaactccataatgagtttctttgatgcctatcttcctctgagaggtaattggtgttgtcaggagcatttgtgtctcactgtcatgaaaaaccctaaactattttaaatgccatattctgtaggtctttgaaaggtttgaaaactatcctctcaaatatatctagaaaacctaactaacatcactataagtttttactattataagtaactatatgtaatctgtatttaattatgtattacatttttaaaagatctgtataaacacaatacctagacaagaggagaaatatacatatcacaaaattgaccattccaatacaaagtattcatttctatatcataatgctccttttctccttaaaaagagatgagttgtgatccttaaccatttataacaaccccatttaaatgaaaacaaatatctataaacaatattcaggatttgtggcattgttctgtccaaactacttcctgctgttagggggcagtgaaataccatgaggattcttagaaaacacagaaacctggctaagtccttgttgttgtagtctgcaaagctgcatcatctcagctgttttagatgctggatcacctggccattgcttcaaggggtcttgtttcatcaaaccatattagtctggaaggaatccacagcttttcattttctgtggaaacacaaatcacatctcttttccaaagtaacatgtccttatacttaaattttgaagtcaaagcattttcgaaatatataagttggattaattcaccagcattgataatcaaaggtctgttagcagctgttgctctttccttcacaatcaaaaaattcaaagacaacacaatagcatacagcatacagactctgtgtattttccatctttatgtggattttttattactctatttcttttattttttcatttttttgagatagggtttctctgtgtaattttggctgcccttgaactcactctatacaccaggctgacattgaaatcacagagatctgcttgcctctgcttctcaagtgctaggattaaaggcgtgtaccaccacacccagctactctcttccctttttcctgtttcttttctcccccaagcctacatatatttttaaacacactgtaaacccttttagaggttttacttcatctaaatctgtctttactgtatatgtttatctttttctggccatggagtcttttatctgctaaacaacattgctaaaattaaagcctcggctatttaagccatggctgttttagccgctggctttccaaagtggtgggcataaatttactgccagcactgggagctgtgctcactgccctgactcttaaacctttatgagtaaaagctaaatctgccatgcagtgtgctggtcattgctgctgccagtttctcatacacaccagtttttgtttggtagcagggcctctttaaagagcccagcaggtttttgccgattatgccaagtcaggaaacagcccttaaaggaacagcgcaagtctctgtttgtctctagcaagcagagcccacctgagaaaatgctgttaccaagaagctgtgcttgtctctgttcttttgtttctaaaatccctttttaagcttttgtcagggttatgaggaaatgtgtgctgcacattgctggcgccattttgttacgtgagttctcttgtcctaccaagtcccactgctgcttccagccccaaagaaacccagggatgctatactatttataaaagtgttggccagagacttgggcttcttgttggctatatctgtcttaactattaactcatatctatcaatctatgtatttccacgtggtcttatcttacggggaatgccggtcctgcaactcctttgctttctacatcatgactgctcagtgtctctgcagagaggaaaagagagggatttcctgtttgtccctgcccagctgcatcacttcctgggatcacatgacagctactctctggctgcacttccctcctcataccctagtcccacctatcaccctgcctggtcaatcagggttttattgattatcatcaaccagtaagcaaacatgtacacagaacattccccatcaatcactgaaaatgcctcagatcagcatggatgatggcttctccatagtcagatagatgcagtgaccccttcagttggacactctacagaccacatcccaagatcacaagaccatgagctgctggagcagaattacagggagctgggagagagacggtgggggttggggtgggagctagatcctcaagtgtggtctaatgatattccccacttctgagggaccatccctcaacttgatcttgagggggcagctgctctgatgaagatggtaatgtctgttagcacagggggcaatactctataacacctctcagtggtaccatgaggggtctggctactgtgttcccttagcagcagaaacctggaaggaacagtcctaatcctgccctccccacgacaccatgctccagacttgggcttctgacctctgtccctgggcaacaacctgtggtaggtcccacccctggaatgaactctgtcatcctcagctctgtgcttgagatgccaaggccctgagagggctacacctccatcatgtggcttcacaatgtgcacagagtctgtaatggtaggtgcctgatggctgggagcaggaaggcaggaccagggagacagcagggaaagcagaagagcaggttaagggaagaaaagaaatctcaagaataaagaacccacgttgtgagaagagaatttttttattggtgtgtgtattgcacacttgtgtgtgcgcacactcacacatgcacacacacgcacacgtacacacatgtataagtctgagtgccaagatgcacattacaaggcgtgcctgtgacagtaaagtgagagaacagcttccgggagctggttctctccttctcgtgtgggtcctgagagttgaacttgggttgccaggcttacacagaaactcaactatttccactaaccatttaagacttgaggaagaaggaaacccactcgtgctaaaatatcacacatcagcaaaagagaccaggttttaggtcttcgcctgacaagatcacgttcttcaattgattcacaagagtaagagtatttttcattgagcctgttggctccccaatagtgacacagagacttatgagttatgaaagttgacttatagctcaggcttgtttctaactcgctcttgtaacttaaattaacccatttctcttcatctatgagctaccacatggcttgttagctcaactcctacatgtcatgtttgtttgccgtctctcagcatctcccttcttcccaacatcctctgtggcccggaaaatcctgcctagctactgcccgcttagcgttttatcaaaccaatacaagtgacacgtcttcacagtgtacaaaaagattgttccacaacacacagggaattcatacgtgtctcctcccaaccccttcctgcaaaaacacaccaaagagtgaagtttaatcaccttgtgaccctcaagggaacagtgctctggctggatgtggctccactgtgactcctcctggctgggccacaacctgccccagagacacctctgggtgttgctctctgctgaaactatgaaaaggaaacaaaagccatcagcagctggaggtagggtgggcagccatgttctgacaaaggtctttcttcaccctgggttttgtgctatagtgctttcacactggatacactagcatcggagcctgcatttttgctaccttaaaagaagtctctggaatgtctttggggccactgggtggttagagctcgaaggagagaggcccttctcttcctgttgaccatctggcatccctgctatttaggtttctgttgcataactgggcctcagaggcaatcgggggaggaaggctttcgcaggtttgtagtggctccggaatgtcaagcatccaggtgcgcctggaagattagctgaaatgagtggttggcaaattacagcctgcaggccaatccagccctccacctgtctctctgtgtgcagtaaactgccattcgcttttgtacttttaagggattgtgagacagaccaaaactgtgctagggagacagccacgaacacacagtataaagtatttagcctccagctttttccacaggaagtcttccagtgtctggtagatagtctctgtggctgagattgtaccaagttctgatatatataaagattaaaaacccagaatctccgatgagaacaaaggtctgcctctgttgagggtgaagcagccacaccggctcagggcttggcccgcagcccaaccctgcctgcttaccatagggtatgttaaggccttgagggtgggagtttccactgatggaggtgaactgctagttgtacagtgggcaggctctgacagtcactgtcgtgtcggcttggctgagtcttgtacccaggtcctcagtcaaatacacttggattttgccatattgccctcttcctatggcctgagtgttcctcaaggccactgtgtcaacatttaatcacaatgtaagttattaataggatgggatgttaccctggatacagtgttcagacatgaggcctttgcagggaagaggaatcagaggaggttttgatggtagagctcctgggaatggatcatggtggctttgtaagaatagggggaacagccaggcaggcaggcaggcaggcagacagacagacagacagacagacagacagacagacagacagacacagacacagacacagacacagacacagacacagacacatacacagacacagacacagacacagacacagacacagacatagacacacatgcataccctatgtctcttaatagacaatgccttgttttcagggctctgcctacaaggagaccaccaccagccagggccccttactttgcacctttagaactgtgaattcaatattttctttattaagttagtctactttgggtatttcattatagtcatgtaagatatgcttccataataggaatgagtctcattcaatggggaaagacctcactagggcaaaggcttacttcccctgagatagaggaagccttaccagctggcagccttaaaactctgcagtccagtttcttcctggggcccatcatatcagcctactctacagatttgagactttctagcagcttctatgacattataaaccaattccttagtataaattcctgttctttccaataccctattgactctgtttctctggggagccttgactatcaccaaggggtgggactatatgtagatatagttcggtttgctttgtttttcgagacagggttcttctgtgcagtcctggctgccctggactccatttgtagaccaggctggcctcaaactcagagaccctcctgcttctgcctcccgagtgctggaactaaaggcatgcaccaccatacctggctgcagatcttttcccattctgtctggctagaagtaaggccaagtgtggtttgtccccgtctctctgttttgtctgcttttcctcaggcttcccctaggtggggagtggcatacaggagagtggttctaatgcccaccatggtttctctccagtgactttcatctgtacccatttccagggccgtcatggactgcttgggcaaggtcccatctgagggtctcctgctttggtcactctggtgcctcccacatggcccgggtggtgggaggtgggggtggagaatgcctggaggcagaggcagaggcctgcctatatcctgcctagctggaagggctggtgttgcagtgctgtggaaggccaagggctacccactggcagctctgttatgacaaggctttcactcattggaggagacccttccacaagatggaaggctactaacccattctgcctctctagtaatgaaatacctgagtaggctaattttacaaagggaggggggtttgttttgattcacagttcagaaggtgccaagagaattgaaaagatgccacatacccacagcagttggaggctcccaataaaaaccatccaaagagaaggaagacaacccagaccaaagtgacatcaaatgaaaaaatggatgcctcgtcacggtgaatacaacaggagagaagaaataaatgcttattttaacacgtcccaacctaagcccaatgatggctaccactgccctggccatgccatcaacatggtctgggacggtggtggagtgggctaggaaccaacccctctctttgtgcctatgcacttgccctagctggccttgactcgctcgtctgtaaaacagaaacaagctggtcagtatgaacttggactcaagagtatggtgatgcctgtgaaatgataacagcaaggggtctattttctgggccctggtccaacagctgcagctatgcagcacactgacatcctgtgtccctcagccttggcctgtgcctctcagagagaggcagggacctgtgtgggaaccaccaaggcatctacctgaggatgaacccccagatgagatgctgaaataccatagcaggggttgagggcaaatttgggttttaaaaagagcttcctatacagttctgtcatggatctttccctcaatgctcagttctccatttcccccaaggaaggtaaagagactcaaagtcctacagctttctattacctttagctatacctacgattgcacgcagagagtacactaagccaccctgagcagtaaatgtcacgccaggcacatgctttcctcctcaagtgacatcgtgtccattcctcacacataggcttctattaagaggctgatggcccatctggaacaggccacttctggagaggcctgtggtgcagcaaatggcttctaaaggtcccttccagccccgcgacttaatgaagtgaggctttcccaaagctgttccgtaaagtggcaaagtgagagcggcttcagtaggaggtaaagagactccctggaagacgttaacctttctggattgtgtgggctgtgaaggaagcagtttggaaagaggccaaaatcaaattgggagcccagggagctttggggtaagctgggagctcacattccaagacagcataccttagctaggctgttatctgttacttttctccatggaacaaaatgcccagccaaagtcagttaaggaaggacggtttctttgggcttatggtttaagaaggatacagtccatcattgccaggaagtcaggatgccagggacatgagtcagcttgtcacctctgtagtcaggaagcacagaaggggaaggctggtgctcagctcccttctcctttctctcagtccagaccctgcctttggaatgctatttcccagttagggtgggtctttgtcttagttagactttctattgctgtgaagagatacctgaccttggcaactcttataaaggagaactataagttgggcctggctttatagttcacaggattagtccattatcgttatggcaggcggcatgcagacagacatggtgctggagaaggagctgcaagtcctacatcttgatctgcaggcagcagaaggaaggagcctgtgtcctacactaggcatagtttgaacataagataactcaaatcctgctgccacagagacacacttcctccaacaaggctacccctactccaacaaaaccacacctcctaaatgtgccactccctatgtggaatttttttcttacaaatcaccacattccattctctcacccccatagacttacagccataccataatgtaaaatacattcagtccaactccaaaagtccccatagtctatagcagtctcaaacttttttaaaagtctaaagttcaaagtctcttttgaacaagcaatctcttaaccataatccctgtaaaatccaaatcaaaaagcagatcatatacttccaacatacaaagacatagtatatacattaccattccaaaatggagcgaagggatcatggtgaggaaatactggaccaaacaagacagaaaaccagctgggcaaactcgaaactctgcatctccatgtctgatgtcaaagtcttcagatctccaattccttttatctttgttgactagaacacatttctctctcttggtctggttctactccctgttatcagttctctttggcaggtatcccacagctctggcatcttcaacatcttgagttctccaaggtaatccaggcttcaccttcacagcttcatgcaatgacctctctaggcctccatgcagggacacccctggcctcagcggcttagtcatagaggaagattctaatgactctaaagctggaaccatatgaccaaagctgccaaattctgctgcttgctggggtggggacatgggcccctcatttgattacatcttcaccaactttctgttttcaatggtttccttcactgcctaagcttggctctcctggaacttgctctgtagactgggctggccttgaactcagagatccacctgcctctgcctctgaagtgctggaattaaaggcgtgcaccaccacaccagactcagagcttttctttaatcccttttcacaggttggaagtgtagctgggtgggatcttgccctgaggtcaccactccctttattctatttcttaatctgtttatctctgtgaacacaggacttagctccactccatttcctgctgctctttttctcctcaaatatttttccttgctcagcttgcatcttttcattataaatcttcattagagttaacactagtaaccacacgacggagtctatactaggctgctttgagatttcctctgccaatgaaattaatccaaatctcttcattttagccccaggcaaacttttctgacaagagcaaaggcagccacattcttcaacaaaatctcataagaacctctaggccacatactaacattcttctcgtcagaaacctcttgagccaggccccacagttcaaatcactctcagcaccactgccttccatgttcctactagtctcccatctcaactttcctaacctagaaactcctttattgatatgcccagagtgttgtctgtcaacaccctgacaatcaacatcagctatcacaatgtccgccatctctggtacccaggatgaaaccctgaagcacagaagggaagaagagaaaagagagtggctgacttgtgcgtcttgtctaacctcatcaccatgttagcaatcagtctcccactgcatagaggagaaagctaaagattagagaaggtaggctgttggagctgacactttgaaagtatcaggatttatcccaggctgtcaagcctgtgttatacactcacagaaaatgctgatagggggatgtagaagtatgggagatgtgactccagggatcaaactatagtcaagttgagtaagtttcagaggtcttctgtcccaggtagcaatcccccatgacagtaagctgtgtgcctgctgtattgagaaagccaacctgtagatggattttttttttttttaggaccatcagctcatcaataagacacagacagagacttattattagttataaagattggctggtagcttgttactaactagatcttacaactctaatcagcccatttttagcaatgctttattgccattactttatactgcccatgctgcttcctctgtctgtctgtctgtctgtctgtctgtctgtctgtctggtgactcttccttcttcccatagtcctgtgttctgaaaatcctgcctccctagtttatgaagtcacagaggctttgtggaggtgcgttccccatttgtttgtgccacaaagccagggactagcagaatggactagcagacagattgctagaatgggcctttctttgagccttagtacatactgcctcagtggcttcatgggctggaacacaggaggagggacacatcttcccagtaggcaaacttccattgagtggtaaatcctcaggaggctacccagggtaacccagtcttctcctctttggcatctcacactcactgtttccttcaggggaacagcctgggctactgtttcagatagcagagctgtctgtcctgccttgctgagaatccaggatttggatgtttttatgtgtgtggggaaacagcccaaatatccgagtgtttacgcttgttgtttgaaggcctcagtggtttttgtagctgagaggaagaagctctgttgatgtatgcaaagagacacttcccaaagtcaagggaaggaacaactcaaggggcactgatgtcactccttctggaatccactctctcctcagctaatggcctcttgggcaaagaactgcccccaccttgactgctgactttggaatactgtcctactgtgctttcaggagataaactgaaccttgccaagtcaggataagacagcctttcaacctccctgcttctgttggtcagtcagatactctaggccttagccaaagttggttgcccctatgctgctgtgagactttgggtgactttccaggtagcctgctgtttctgtcttcactgcacctttggaagttgcttgcctgaacttcctacctaccctagtattgttatcttccttctcgggtctttaatgaggttgaagattagactgttaaaattattgttctctcttcctagatagaaatattaggtgtaagacttaaactttgcagcataggacaactctagtaatccctgttatgcctaggactggatatgtagttcttaccatttgctctagttgcttcactggcaataggtcttaagtgtgtatgttcttacatttccttctcctggagcatatttgatatttgctatctttgtatatagttttgaatcaagcctaaatctctttctttagactaaaaggggaattgtaatgagatatccacccagccctcacctgaagcgctgaccatgcccatttgggcgtggtcacaggtgtggatttggtggctctctcactacaaccatccacagcaggagaagcatccatgacgtatctgctgcacctgagcatagcacacagcttgacagtgggagcctggggttgctttgctttctgttgctgtgataaaacagtcacttagagcaacttggagaggaaagggtttgttttgtttacaggttacagaccacaatcaggggaagccagggcagaaacctggaggcaggaactgaagcagaggctgtgcaggagctctgtttactgggttgttcaccatggcttactcagcctgctttccttatacaacccaggaccacctacgcagggctggtaccacccatggtagacatcattcattcattgagaaaatgctctcccaggcttacccacatgccaatctgatggaggcattttctcaagtgagtttccatctccttagctgaccagtttcccaatttttgtcaagttgacaaaaaagtagccagcaagggttttacaagggttctctgtgtaccctgtgtttgactctctctgcatgttaagtacttttgtcccattgaaataatcagctatagattcataaagacagaaagcaggacgctggtgttcaggggtggagatgagaggtgaggatgttctggacaagcatggcgaccatggtggatcagcaaggagagcatattaactcaagtggtgagcagtcaacaagaagagagaggaaaggccaaccacagggctgctttgacatcataggcctggccaaagggtcaggcctctgagtccccagtgtcctacttcagcgccctaaaggtagcatccaaaccaggcacagggatcaggcctgcccacctctgcagccttggaggggagaagcagtgagtgggaaggaccagccttgagtatctggggattctactaccccttcccagcacccatcattccagaggaaataaagttccccaaaggaagccgtatggggaacgaaaagggaaagatctagggctccgttccctgcttttctcaagggtcattgaataaacacctgcagacttggcctggatctgcctgggctctgcagtcagcaagcaggcattcatacattcccaccaggtcctggggaaacaaagagcagtgacttctagccatgctctgggtcctagcaggaaggatgatagataccaggagagatgtagggatgggatgagggttgttggagggcccactagggaggtattacaggcagggtgacagagtttccagggaaggtttcgtggaggaggcagtctcggctgaatgtccaggcgggaaatggaacccttgctgaacaggttagaaagcagcgggtactcaggtgagcgggaagtctacaaagacatctcccatcctgctaagtccccttctctcattttctggagccctgctgacagccggacaaattgcaagaaaagacccctccctcaagacttacccacttaagatttgccaaagatgtggttttaagaccaactgagagaaaacgagctgtctcctgggggaaacgaggccacttgtacagcgaagaatgtgtccttggcttcctctgtgagcggagccactgaagcagaaacacacaagaacacacagtggccatgaccaactgtgggtggctttgttcttcagacaagtagtttccagagataccagagcatgctgccttcagtaaacaataacccgcgtgcttggagcagagtcctgccacagactcctcaactccatgccttcacccctcttactcccacacccttgtgtgtgcagctcgcactgatgccaagccatccagggtgtgtggccagagggaaggctgtgttccagcttagaagctggcttcttggtgaatgaacttaggcaaggaaaacggctgtgtcccctcccatttatcggtactgatttgttttctccagatgtaggttttatagtcagaaactaaccaacacaaaagcaaacactcagaggacacggtccaaaaaattgaacaagagaatccataatcagattgagggatgcagggaggacagacagacagacagacaaacagacagacagacagacagacagacactcaggggcagggagagggagattaatcaacagatatatgataccagatagtcctctcctcagcagcaattaatagggaaatacatatgtcccctcccttttgcatagaaaaatctattggtttgttttttgtttgttttttgttttgttttttggtggaaagcaagttcccctctcccagggacctcagagtgcttgaaggcatcagacctgacaagtgactgctgaataaataaatgagaaagacttagactcctctccttttctctgaagaggtaaccatcatgtctggcctcacgacatcaaggcctggggaaggcaggtgcctgatatttttgtagagaacagaatgataacggtcatagttacttacccttgactcggactaaatgagatgactcttctctgggctgtggcttccttgttgtgacaatggtgtgacaacaatgtggcactggtgatgccttctggtaaagttgacaatggctgaggaacccgcctgtaaactgaagggcacagcccacattgggaggattttaatcttgatcttgcctggtacaagaccctgttcattttttaggactgaaaagagaattctacagatgcgtcatcatctgtccttggcttcaacatgcatgcctcaggaggtagccacagtgataggcatcagcctacctgcagtcagacctgaccacgaagggcagactccttgccttacatctgggtccctaggatttcacacacgcattaaatgaactgttctcactgctggggaaaccttcaccttaggttgttgagattgtcctcaagcatccacgtgcccctgcacggctgacagctgaggaagagcaggttcagtaagattgatttcagccatggctgactctcacagaacactgaatggtataagcacaccttcccacttaacctcaggttaaccctgtgcagcagtgttggtatgaatggcagaattcccattttaaagatgagcagactgagaaagagttaagccatgcaccaagtccacccagtgagcaagtcagtgacaaggaggatgagtaggcacaacaaaaggacatggacttcactggacatggtgggtggctggagtgtcacctgcatgggctgatcgctacagcagaggacaatggacaaggtggactcctgcccctccccgtgacccctccagaaggaatcttgatcatgtcccgtgccatgttccctgctgtgggtacacccaccctcccgcagagaaccgcagttctctagatgatgaagggctccgggaaggggaggagaattaattagttcccagcaaatagatcaggggcctgattcctcccaccgcagggagctggtggcttatggttgagactaagcgggccccaggaagttatatccaccatgtctacacagacagtgattggagtgcatccccaaggtgctcctcgtcaatcctatcgtcctcattgctggattacaaggtgacctacaggcattcatgaaggtcccggcctcgctgccactagtatgtagacaacagaggctgggctatcagtctaggcacgagcttctcagacctgacccactgctccacactcagacagtctcttctggcatgtcttgggtcttgggacctgccacccttagaggccagggagaaatgccagaggacatcagttcaaattcaagctctttcttttcattcagcacttgtgtgtgaccgaccttggctgcattttgtaacctctcaaagcacctgctttctactttctttaaattatatcatatttacttattttcacatacccatgtatctgtatttatgtgggaaggtgcggatgtgccatggcatgtgtgtggggcatgtgtcatgggacaacttacgaatgtcacatgggaatcaggactcactagactcagtacagattaagtgacgtttattcgggaagaatgcacttacacgtgaaacagatgaccgtccagtgttccctctccaaggattcttccaggctgttctccgtgacctgactggaagcaacagagagcgcacctgtgctccgaccccaggaccccagacctaaacccactctctgtcacatccacacccgtgactacgccaaaatgggcgtggtcagcgctacaggtgcaagggtggggggaatctcacacatatgagagttgtttctctctttttattttatgggtcccagacttgaacccaaggcaggttgctgtcatgataacatgagctgggatcacgcagtcctacgacagattcctgggtatgaagacagggcgatgcttggatctactgacaagataggggctggaaaggaggctagtcaccaatcacaggagaacccaaggcagatggctgccaatgcagctcacacagtatctcccatacagcctgcactacgaccttgggcaaaggcatccatccatccctccctgtgccatctcctattagagagcctgagaaaaatagcaattatctgcttcagtctcagaaagtctttaaataattaacatttataggacagctttgaattccttcagatatgagctgtggtgaaaatattattattgttttaaaaaatatgtctccaatcccaggctactgtggaagggcctgttatcttctccctgggggtagctgtttgcaagctgattaattaaaactcgttttttctgactttctaatttagatgttaataaattcaataatttgatccatttgttgttctagataaggtcctttgggaataacttctcatttatgatagtgacccggtgaggagtctcttaaactatatgataaatactttcgatatgaaacagcaaaaatggcagtatgactatagcagacacacaggcccctgaggacccagacaatgcccagcccaaacatcacccatgagacccccataaggaatgcaatccgtgtttcgtctgatttttccatttaagttctcaaccctaccattcacattaattggctttgcctcaatctctatccaaaggagaggacattcagaatgatgcagctgctattctgtcccttacaccttctctggtctctgtcatctttcaggtgcaaaaggcaggccacatggaagaagagccagcttgagccagtaggcacacagatgacaaggaagagtcaagtcaagtctaaccgctgtgtggcgatgatgcctgggtgccaggagtggttggagactcgatgaagaggtgggcttctgctgtttccaggacatctctctgtagcttagtggccagccgaggactagcttagtcttgagacccgccagcagctcagatccccactggacattttattatgggacctaaattttctcaaagacctcgatttctaagaccttcagagaggattcaactctcccctagatgtgcctatggctacagtttttatcttaaatttcttccagaagcccatgtgtcaaagcctgttctcccacttggtgttgaccaaaggctgtgaggcaggccccagtggcaggtctctcaggctttaggagcgtgctcttgaaggggagtgtaggactcaggtatcttgttctttctctggtctcaacagtgaggtaactggcttggttcccaacataatacaacatgctgctactccgaaggccccaccttgttgcctggatatcggttcctcttcgtcccttagctctcactagcctgccagttctcctcagccaggctaacttcaggttcctgggaagccacaattgcctgactggtagtatggatggatttgcctctggctctctgctacctgcatagagatgtcaatggctcaggtgcaaccattgcaatgtacagggtggcctcataatctccacccctaaaagaagcctctgcaggcaaactactaaagggagtgtcatcctgtgatcacaggccactggcagggagcaggttggggacacacaccccagcccctctgtctcctggcccagcacaggtggcataggtggtcccatggtctgctctctccaactggactttatcttagctctgggttttcagggtagatacaccaagagactcagagtctgggcgagtagaaagatttgcctttgcacatggacagtatcatcaaaccatctactgagaacagaggcaagcaaagtccctgtgggcttgggctcagaaagggcaaaactagactttggtcttctctgaagaatgatccaaaagaaaagtggcatgaaacatgggacttcccaggatgggaactattttctaaaatcaacactggtcactttccacacatgggacctgtgtgccatggaaggccatgcttacatggatgttccactgttgctgacctgaaactgaggatatatatatcctcagagagagagagagagagagagagagagagagagagagagagagagagattcatcccgtaagttctgtgactctagagaaccctgactaatacacgagtccatttgttcaaaggcattagagcctgcttccaaggaagtgtatactcaagacaactgagacatccagccttgtagactcagtaactgctggacacttggaccttccttccattcacaagcagccattgataggttgtctggagcacagtctgtaagtcattctaataaatcccctttctatagagaaagattcactctctaagctctgttactctagagaactttgactagtacagtgaccaatcacatttgtcagaaacctgtgtttcaggagactcagcccattgtctgatgcaccccacaatcagtatggggagccatgctgacctttcctggttgtctgttccacaccttctacctggacatgagtggcagagaatgaacctcctttctctgtgttgggcagggttcaaataagagaacagaaaccgtccttgttttaatcagaagagataaagggtctgtgcctctggccagccctgtgtcatgcacattgtcacatcgatgccagaagatgactgtgtgctgagcttgggtgaggagactggagctctgtgttagaattcctcgactcttcccttggctggttttataatctttcctacagtaacccacaaccgtgactgtaatggctgtcaggaagctctgcaaaaaccttctagagatttccagaacctagcagttgggagttgggaaccttctaaacatgcagctggagttagagagagagtgtgatctaggcctctgctgctctgggtttacagttgactcactcacttgggcattagatgctgacaggccagaggataagagtccagtttgccactcctggcctaccccagactctagtgtttattttcactgtaaaaattccacagatcgctgcctggttgtcttgagatgagactgcccagggaacagaactgtctgggaaaaaccatgttggccagagcattcttcttgctgccatgatggatgaaaaagaaggatctaactaacgctgtgcctctgaatgtgggtccagatcttactgagtggtgtgaactgtagtcggagctctgtcaacgagagggccaaaagcagatgctaggctttctgagcaagagcgagcagaggtcatgggccagtccaccgacgcactgtgaagggagatccccagatccactctctacttttcagctaccacacgcctactatggaggaaggttggggacacatgtggctaggcttgggggcactgtgtgattgcatgtaacctcattcctctcactgatgtgtgagtttcaggcctggggagatttgaatgagaaatgcccctctgtaggctccggtatttgagcccttgtctcctggttcgtaaacttgtttggggagctttgggtggtgcagacttgccgaccacagtaggtcgctgggagcaatctttgagagtttaagtctcactgtgtacttgctgcgagctctcaggttcctgtggtgactctcatgactactatttgctgacatgtcttctggcatgcctccctgccatgacggaccctcacccctctggaaccataagccaaaacaccttctgtgagttcccttggttacagaactttatcacagcaacagaaaagaaactaatgcgacccccaagtgtctgtttatattgagttaggttgacaataaccaaggcaacaacaaaacctggaataatgaagagatatgggatctgagattttacctccaattttgtctttgtgaataacagaagcgattgcagcccctggtactcaggcaggaccataggtgaggccttcctttaatactcctatttccaaaatctgaaatcaccagagcaatcaatgaaaagataaatagtcgtttggtgaaaagatacctggtttatgcatcgagttaatggtggaaatttctttatatttaccacttgtcaaaacagaagaaagaaattccgaagtgttagaagcaattgttagttgaatgccaattatgaatgccaggagactacctcggaagcatttggggaaatctctggagaattgtaatttgcttcacacactgtttctacgactgtcttcgttttgtacaataagactgagctgtaaattatgggtatggcatggcttgttgaattctctctagggggctgacaggagcatttccagtcttcattggctgctgatctccctggaagattctgtttcctgcatgtattactgttctctgagtatggaatatccagactgaatagccttgaacattagagatattgatcaccacctatcccatcaagaagtctgcaggaagcaggaagtggtcagcctgcttaattccttccatgtgatgaagacaccaagggccagctgctttctgctcttctctgccatccacagtgtcagcctggatcctgcaaagtggaagatggctgcaaatccccaggtccgtcatgatcgcgtcagaaaggaaagacaacatctttgcacaactctctttttgtcatctttccctgaagggccttgctagttctttaatcacggctgggtcacatgtgcgctcagctgcaaggactccgctggcatgtcatctgtcccatgcacacattcaactacaactgaaggaggttaggacaaaatctagggtcagttttatgactcttaccacaggctccttcccacagcatgggccatgccctgcacacagtggggactcagcaaatgagaagctaagaaataagacatctgagcaccagcagaggccgatgcggattcaaacccatatccctctgactttgtcatccaagcctcctcagaccaagaaccaggccttagtttctttcctctcatcaagacagcagctggcaatgctggaccagaaaaatgtctgtgtcagacatgtaaagcaaaacatccccctcagaactggcaaaagacacactagacaccgaattctcaccacaaaggagatgtatttacccagaagggcaagaggtgagagtggggtctgcaaagggagagagcaagcagcaagcaggcaacaagaagggtttctgtttgttttattttattttattttattttgcagaaatgggtttttaaggaagaaaggaggaatctgtgctagggtgagttggtaagtactgattggacatagtagccaaatagtgaattttgagtgttggacgttggtgttttgtctcaggaacgagtcaatggcctaataagggaatggaccttggggtctagctttaggaatgtagcctaatggtttttagcaaggcagagggaaagggagggaagggcaaaacctgttggcgccatgtttgccacgctcaagcctgttagacagcccttgctgccatgttcttgttctcaagccattcaagagaccgacatgctcaggcaggagaagcccagagatccctgcagatgagctaccgtcacaaccaaagctgacccctcagagttaggagccttgacctcagatctggaaatagaagggctttgttggcatggctgagacacagaggagaacactctgaagttaaaacgggccctttggaagagctaaatccaaatggctttcaagaggagagaacagtagttcagaggcaaagtaaggcaagctatcaggcaaccccatccccagcagagacacaaagacagggacagtcccttggccctcaagatgtcagtaggggtcactaaaacgaccccgcctctacaacttgcagtagttaagaatctcatttaactgaggggccctgtggccttgacaagctctcttcctgtgtacttccaacatcttctaagaagccaggaagaagttgggatttcaccagggacctcatcaaacaagcagatcaaaaagggattttgccctcttactctggggtaaacaccccagggatgagtgcccctggagggcagcagacaatttgagctgaagagattacaatgatagttgctttaaaccaaggaaaccaaagcctcagtgagacacaggttctgcggctcattggatagacgaatgagcccgctttccactcctaattagctacataatcttgagcaggttggtaagcttcccaataccagtctcttcccaagtaaaatgaaattaatagtgttgattgcacagggcagtcttgagcaccagacaaaaagaggtatggggaggctactttctgcaacagccaatctctgaagcttccctgctcacatcctgccccacttgagagtccctgaggcagcagggagctggacactttcattccatgagctctcttttctttttctgctgcatcttgggcaaagagctaggcaagagatcccagacatgaattctgaccttcagagagtgccatcagctagggtctgggtggtatggggtagggggttgtacagaggactcacaactgccctgttccaccctgttcctccacactgctttcttgaagctatccatttggggaagatggcagtaactgctgtcaagagtgacattcatttttccatctcttctttccagtcgtacactgggcctgctcaatttctctttggttctaagtagaaaaatggatcttcatggtagagcccattcccagcatgcatgagaccctagttttaatccatagcacttccaaaaggaaaaagcacatgaataaataagcaaggcaatggctcacatcgacccttctggaagaagtcataatccatagggaggaatccctttcctacagctcctgggctcccttccattctctactacctctgtggctacatggcaagttttctgaaaatttcccctttgaattgtaagtgtgtcctgcagaggaagcctcaagcacaaacagggatatccagagcctgaggtggcagcttggacccctgcttgtcctctgggacctcagcaggcagcatctttgcctccatatcctccagagcttgatgtgaagatgcaatcgcctcacaaggagcttgtaaggaacagctgaggagcagttggattcctaaggcgctttgcaaagtgccacacaaataactcctcacataagcgatggccatatctacaaaacactgtggattttaagaaaaaaagtccatcgctgcgaacagaggcacacatcacgtcatcgtgccaggatgcaaaggccctgggagtgagatgcctgcagtgtgctgagaattaaatgtcagccaagactttctcctgctcttcatttcccaccatcacaacacgcagacagcaagagatgcatagatgtgttctgaaaaccaccagcagtaaaatccacttaaaatatccagacagccctcgtgtgggggtattcatggtaactttgattctattgtagctacctttcatattctgaaaagtggacagaattaagacatgaacattaatcttcagtcttatctttggttgttaagccctcatgcattgattgcctggagatatttctgaaggaggagtctgccttcaccttagacctcagtgtttaagttagctagatgtcatttgcagtcaggtagatggtacacatttatactcccagccctggagagaccaaggcaggagcatctttagttcaatacaaacctgggttgtatagttagaatcttcaaacaaacaaacaaacaaacaaacaaacaaacaaaaaacacacagagcagaggttatttataaagatagtccaaagccagcttcctactcccaacccccccacacacaaccacacacaccataaacatacaccataaacacacaccacacacacactcacacacacacacacacacacacacaacacacacacacacaacatacacacacaacacacacatcacacacatcacacacaccacacacatatcacaccacacacacacacacacacacacacacacacacacacacacacacactcacacacacctccatttgatagaatgatgttgagacagctctatgctaggttgggaaaaatcagtagaatatgactgtgtaaagccacactgtcttttagtgtgacaacttaaatagtctatctctgagctgaaagcagcatcaacacaaagtgccattttggtgaccagccaagcctgtcctaacttgggacagatagagaatacagacaggccaaacctttgaaacctcagtgcaatttggcaaaaaaagagtacaaataaaatataatgggaaaaaaacccactagaatgttaaataagcatcacaagaaaatatatggacaatcttctaccaataaaatttaaaacttggatgaattaaacaatttcctagatgatttaattcactcccagaaacaaaaagcagacttctgggttaaggcagtgagtggaataagcatgtcactacactcccttccgtacgccccttaaaactatcgtaaaagatcatttgaagtttaaaaaaaaaggagggggaactggaaatcaaataaacacacggtgaccaagttaaactcctgggagaatggaatctggtggtccctgggcacagtgtcacatgcacccaggcacagttctttcctgtcctgtttcccagacacccttcctttggggactgagagacatatgagcgtagcatctcactgtgctcacggccagttgggcctgctatcccccatgaggaagctggatgtctactcctcctccctctctgctggtgacctccacgcctacagcaccagagggacaagagtgccagggtgctcgtgtccattcttcccaagaccctggtcaggaggcttctacttcttctctcacattccctgtgatgctgctatgtcccttcttcaggcagaatgaggtcagagagggtgtcacaagagagtccagtgttgtcttaccttcattaaagcaatgtcaaggccagtgtcccatgttcctttctgctttggctagcattagaggaaatctcaggcctattgatgcttgaagaatctgcacacatctctggcatctcctaaacacacacacacacacacacacacacacacacacacacacacacacaccagcttaaaccttccactcagccactccaagttctactgtgggttcctgttactcaggcaagtcccgacttttaaatcttctacagaaaatagacaacatgtaattttgtttgcacttatagtgatcacacttgacagcatcaacataactgtctccctcctcacacaacatttaaaagtgtaaatgaacctactcctcgcatttgaaattctcatttcaatccgagagatcaaccgctgaatccttcagcaacctagcacccctttgcttccactgggttgtgagaaacagagcaaaagtccaagcaagttatctgaatttaacatgacaaagaaaattgttgtagaggtctagaataaatgccttctgatgtcaagaagacagagaaagaacatggggtctatagaatgaacagggtttctaggctttctgtgtatgtgtttacttataatactgagatggcagaatgccatcagagtgtgttctgtgcctgtcctgaatcctggccttgatgctcgcatgctcttccatctaggtcacagcaacccaggacagcagacgccactaatacccattttgcaaatgaagaaaattctctttctgctaccaccaatatttcatttccatcaagcttgagagagctagacttcttctcagcctgaaaaagagttttctagaccttaccctacacctttgctctttatcccttgggtaagagtgaagacttcctgaaggtaggtcctctgccaaggtaagccagaatcccaaggaccctaggttcattggccaagggtatcaaaaccaaagaccaagtatcactggccatgtcaatcacaccttcctgtcaggcttatactgacatttttggtttggttaatgacaccaaaaagagagaccattgctgacctacatgataccgattgtctttctagatttggatactagctcaaccaagaaggaaagccttttctggtccttggggacacacagcaacctcttagcggtctgtgtgccatagttacaaatgcagccacagcgattcactgaactctttcaggtgcccacatgctccataaaaagccttctccatcattagttctatggctcaagacctcctgcaggctgtgccatttacccacaatcatctgctttgacccaaaactcaacagctcttaccctgatgccagggatctgctctttctatctgacttcatggtgacctacttcttggaccatctatccagttcagcccttgcttctttttcctttttagtcattggctaacattcctttactcttcgcagtcttcccctaaaattctcagccctccacgtggacttcccaaactgagaatgagaagaagacatgggtgtctatgatcaagaaagggaaggtgcatccatttagcaactgtcaatctttacaacatgctacttgttaatcctacattttatcccagaaatagattaaagagccccacaagactgcataaaagaccaacatatcatgagtgaggagtagaagctagaaaaaaaagtaacaatacacagaaactaaaattaaagtgcaatgtgtgctatatacactcttcattaggtataagctgccatgttgtctctaatgtccccagcacatggtagggaaagagagcctgggagctcacaggaggctagcattgccatcttcagcctggagtaagaaatggccagaacttgaccagttcatccaaagcactgctaagaggcggccggaaagatctgaaatttggtcttagatttagactctgaactcattccagtgtcaactagggccacagcttcttcctgaattcctggtccatcagcatccatcagttgtcatgatcactgtggtcaaatggaaaggacagaagtctttattaagatacagagtttatgtttagggtcagagtgggagcttgtgggccaatgggaacagtggcagcagatcttgggctgagggtcttgtgacagtgctgcctttttatgggggtatggggatgctttacagaggccatctcaccccagtggagcaagaagacaacatctggctgatttggtcctatgtcccctgagatgacggaagcagactctgctgtcattctatcttagtaagaggcagaaaccagtccaccaatgccccactcaaggcagaaccgcaaggtggagggaggaagagaaagccctccaaggtgcccctgtgtgactgccctgttccctgcttcacctcgaaggtggtgtcgacagccaataggctcatcgtctggggggataacattagcctcatcattacatcttactaactaagtcatttaaaattaattaccatgcactccggaaagaattagctatggttgactcttccgttcctgctgattattgagttggcagaattcattagccctgtagacaaaccagtgggtttctaagcactgagtggagacaagctcaggctccttctcatggtggattgctcctggaagcaagcacatctggggaagccccagcctgcagggagcagcatggctgggggatcatggctgaccccacacacagggtgtccagcttgagtgctatagcaagggcagatagcctcctctttacttaactttgtccttcacctctctaaggatctctgggggaaactgtgcaaattagcatgtcaaccagttccctcaggacccaagagtctcaaaggaccatggaaccgatgctccgcatagaggacgtaactctcagagtgatccctatgtggaaaagtaagctgaagactgctgcgctgatagccaagggcgtgaggtctccttgacctctccaagcctcagtacctccaagaatcaataaccaaattccatggtctatttactgtatactgagcactgatctgaatacatgggacactggtgtcatcctgaccacccaactctatgaatttgctgcaatcattgttcccattttcaaatgagaaagcatgggagtagtgtggtggtttgagtgaaaatggcccccataggctcatggggagtgcattacttaaaaggattaggagtcacagctttgttggagggaaatgtgtcatggagaaaggctttgaggtttcagacactcaagccaggtccagtagctcactctttttctgctgcctgctgccccagatggagaactctcagcaccctctccagcaccatgtctgcctgcccattgccatgctgcttgtcatgacgataatggactaaacctttgaactgtaagccatccccaactaaatgttttcctctataagagttgtcatggctatagtgtctcttcacagcaatagaaatcctaaatcagaagctggtaccaggagtgaggtattgttatgataggcctgaccctgactttggaatttagggttaggaaagcaggtgaatgctttaagcagagtttaatgggccatgctaggaggaacatggaaaacagtggggctgagggtgatttgaactgtggaggcctggctcaagagatttcagaggagaagaattttagtatgtggcctggagaccgttcttgtgatattttggtaaagaatgtagactctttctgcccttgtccaaaaatctgcctgaggcaaaactgaagaattatgaattaacagctttggcagagaagatttcaaaacagcctagtattgactgtgctctgtggtaattagtagccaatattatgcagatctataatgaaaaggagcaagctgagcaaggaaaaacacaaaatgttcagtttgaagagaaaaggggcagcaggttgatccgtggcaccaggttgatccgtggcaccaggcagatccgtggcaccaggtggatccgtggcaccaggcagatccatggcagctgaagcatgaggctgtttgctcacatctcagcaatgaggaagcagagaaaggagaatgttgacgttcagctgccattctccttcccccactttgacttggtccccagccaacgacattcaggtggctcttcttctaaaagttcaccttttctagaaatgccctcaagacatcattcaagcagtgcctcagtaatgtccctggggaccaagctgctatgggtattaactgtcactgaaaagctgagaaacccagggaaaccatggtggaggaaagtgaggacggctgtggccctggtagctcacaatggggaggtcacccacaggaaaatggagtaagggatggacaagaaatggggataagggtggtaagacaatggtgacccagggtatgcaaagtcccttcaactcccagggcccatatgggaaataagaatttatttagtccctacgggagtacttaaaaatacaaacattatttaaaacataatttatatacctcagattattttgcctgcattcttcagattagttctctgctaatgaactaaaatgaagtctttatcgtccttttataatcacagattactgaaacattaaaagcagacgaacaaaattctcagtaacaggtccactcttggactgtttcagctgaaggcattgtgtatcctatggttccttcatattcttatagcagaggcttggccaatccctttataagcatgcccagagttgacactacctccataggtaccactgccccctcatctgggctgtgaccatagccccctggcagtgtctctgctgctcctcaactcctcaggtcaccagccaatcaacactgagagtgcaaggggactccttgtctcccttgcttgaaccctccaaagacttccatcctcatctgtttatgtagtggcaaagcaagagaaacaaagtgaagtgttctagaaacctctcgtggaagctaagaaatccaagatctcaacatcaggcaagtgaaacaaagtgaggtgttacagaaacctctcgtggaagctaagaaatccaagatcacaacgtcaggcaagtgaaacaaagtgatgtgttatagaaacctctcgtggaagctaagaaatccaagatcgcaacatcaggcaagctcagagtctggtgacagttctcttgcagggtcctctcatagtggaaggcaggaaggtgaaataaaaaaggccctaagctagttcctccaatctttttataaggacaaatccattcacagggcacaattcgataacttcatcactcccccaaaggtcctcatctccagcagcaccacaatggggtttaggtttccacgtgaattctggcaggacagacactttcattcaaaccagagctacgtcccatttcaacccaggtcctggggtgatctccaccccaccctacccccacccccatccccaccccaccccctcccttgctgttcttcaaatttaccgcatctgtgtttcttgtgctgcgtggaccggaagcactcatctgaacagccacgcagcaggttccttgtgtttcccatgtctttgttcaaatgcctttccagaactctctttgtggaagtgaacactcacacagacacagaaacattccttatctctttccccactcatgttttattgctcttctcataatatttaacatgtgtacactttgcaacaagagtgtagaatttactcatttgctgtctggtccctcaaattgaatatgactctccagagacaggcatttgttaatggtttgttctctgctgtccctctggactagaaagtacctaacaccctgtgggtgctcaaaaacaaagcaaaacaaaaactggcaacagattgaatttcagctcatgagaggctttgactcccaaagctactgctgtgatggaattccacgcgctgccctgcacacgacattccgtcaaaaggagaggcaaaccgtggtcaatccactgcaacttccccaatagtttgcagctttagcctccttcagctgtatagctgttccctcctcaagaccccagctctgcagcagtccgaggttcaatgtactagaatcttgccagtgagttcataagttttaataagtccaatgacgactgggcagtgatgcctgcctgtgctcccagctagtcagcagcaacactcccgtctagaccacgtagccaggctcagtcaaaaacagtattccgaacctcatgcctttgttcactgagcttcctgtagcagctacctccatggaaccttgaagttctggttttatccattcagcctctacttttctaacctatttaaatgcattttatcacactccttctgttcaaataactagtacgggttctgtttcccaaaggagagggtggagacagcccacactcaggatgacaccctcagcctccctgtctaagcttctgccaggagcctggctccagaagaacagccatgtctcccctggcctcacagcccagggaggtaactctgcttcgtagtctccactgccccatggagctctgcctaaaccccaagacagagctggggcccccatgcccacacttacctcctaactgactcctctcatctcttgaggctacttgggttggtatctgccactcttggtggtacataccaaaccaggcccccatcttattatagtcatacgcctgccgcctggaatacttcctagtacatagtaggtactcagtaatgtgcactgggtctaataacatttgatagcatggatattcccatgtgtgatacaaaacccctcgtttttatgtgccatccaagctggtgtaaattcaaaaaagaaaaggaaaaaaaaaaaaacccaggtggcaatgaaaagaaaaaaaaaaaaaactgagactaggagcccctgctttaatcaccaccatgcaaattgggactttgagatgtgaaggcacgcaggtccccagcgagtctccctccgcctaacgctgggctataattatgtttgcattgagtctgcatattattatttacatttctgtgctggtgtttgcacagttggcacagttcccaaggaagcccttcctatctgagcccagggcttggtgcagagctctcagaaggactgctgagggccgcagagagaggctttgctccagggctggaagggttgtgtgagccagggatcttcttccccggctccctctatttgcctcctctcctcccctcccctctcctctcctctcctctttttccctctcttagcctttcttctaccctcccctctctcatcctggtagcatatattgcaatagataaggaccccgttatagccgctcatgcttcccctgtgtaattagcaagtgcattgttgtgtaattcagaaattaattagcagttaatgtttcagggatgcaggtggaaatggggacccactgtgctccgccagccatgcagctggagtgctttctatctcctggggtggggaactttctagtacattctctatagaggaacaccactcaggtcactgagatgctaggggccctctctttctcagcctcggcgggtgggaaagacataacaccacaagctggctacatatcaaggggccttggccattgctagacagcaactgtagaagatattctcggctactcagaaagctactggcgttccagcccagataatgggggtggtcagaccttaccaagcaacccgagcttagagagatgtaaagtagcctgcaataactttccactgatgggaaaacaccatgtgacttagcataggttagttcatgaaccaaaacaggactaagatgggggcatttgctctctggcccaggcagggctgcggtggtaagcttggagacgtgtagacactgtgaattcccccaggagcacggggatctccaagcagacgtgtcttctttgccacttacctttcctgccctgttccctccttatggaataccttcccctctcaccagtgcctcaaacataccgagaaatgtgtggcacgtgaggtgactgaatgaacaaagctccttatttcaagtcccctcctgtcctgcatgaagcctgttttctgaggcaccattgccctccccgactacttggctggccttttctgtactttcttaccacactcaggtcattcctggcttaaatgactgccactcctgtgccagtgtctctgccactgacagctgccaagcttgccctgtgcattccacctgcagctccctgggcaaaggctgaacctgacaggtggctgctgcttaagaaacatttgttgattgaatgattgaggtggtgactcacttctactccaggagaagggaactgggaaggtccgaggtgcagagccacacgttagcatccaggctgtcttggaagagactctccagcaaccctttccggagcctaaggaaggttcttttgactacagaagggcttgggctggaacttcaacagcagttcataaccctcatctcactccattcaacaagcctgagatgaagatctctggcctgcagtgcccatgtgaagatccttgagcgtccccatctgttttctctcttaaccatggttccctgcagagcatttagaagtgctttagcagtgcccctcctggagctggaaggctacggggtggaaggatggcaacagctgtggtcatgccactcataggagcacttgggcgacaactctgagaggcctgctgaacctcaggctcatcaggctagaaattaatacatggaaggcgggcaagcctccaaatcagcaagagacccaaacaccacggtgaacagcaacacctaagctcatggctgccttcttggggtctgggctttccagctatgtccacagaccttcccagcaaccccataaggcatgtgtctgctttcagcccattttatagacacaaataagcacaagcataaaaccggcagcaagatggagacatttgtttgtatatgtgcgaagaaatgaaggaattggtcacgggaaattccaggcaaggagaggcttcgagactcctttgctctgctttgacatgcagaataattcacaagacctcaagtctagcatgctgttttctgtgatgtcccttcccatgtgcccactgagagctagccttgtgctctctgttgcacacagtgggaggagcatggcttctggacttccctttatgtttgcactactggagatgcaaccctgaccccaagcatactagatgagcaccatttgaaagcttgtagtccagaggggaggggcttgagaatgaggtgggaaggaaaaagaaatgcttagaagccaggaaggacctgctttccatccccaggaggggtttggggaaagtaaaagactgagaaagactgggtgtgggcactgggcaggggcttttagcccagatagtccccagtcatcaggcccaggagacagaggccacctccaaggataggcaggtttgggcggcatccctgtcagagtgaaaatgagacatattttcccactatgctgtgccctgtaaagcacactgtgtggccctctggggggcagatagaatgggaaccctgtgtgagatttaattaggccaaggaacaaacgtgttgaacaaattcacatcgccagcactctctcttcaaactccaattattcctcactcactcaggagtgcgaaaaaaggaagatggctgtagattacaaagtgcacaacaaggaactatttgattctccatccaaataaaccaactataaagaagaaatagatgttgacgtcagtcaatggaatttgaatggaaattggttcatagtcgagattaaagaattgttaatttttttttttttgcattggatcaggaactgtggctgtataacctcttttcacagtgaagcatacaataaagtaaaatgtcagattccgtggcatgatagctgacattttacttcagcaaaaatgtcttcagcacacatacaaaaaacagatatggcataacattaaaaaaaattgttctgtgtatttggtaatatatggggcattggaacactgttgtttcaattttatttatattagacttgaataaacatataagtgatatcatcttatatattttaatagttaaataatagtaagttaatttctataggaaataatgtatagagagctggacatggagagacatatgtataatcctggcacttgggatttggaggcagacaagtgaggtgaggaccacgtgggctacgtagggagaccttgtctcaaaagaaatggctagggatgccagcaactagagcacttgcctagcatggggggtcatcctgagtaccacagagaaagaaagagaggagacacatccgcagctttaagtagctctgtggagggcacagtgcctctgccttatttccccagtggcgacttctgtagacaactagtgagtcaaggcaggtctccccacgtcatgaggagcctacatccatctccacaagaggcaggctcttcactgtcaccttgtccccgactggcaggccctaaggacacacggctcagtgtcagcagatgttaatccctcacaatttgggagtctggggagttcacggcgatggtgctagcgggtttggtgtctggtgtgagtgcatggtctgtgattcctaggggtctggccttctgtatcctcacatggtaggtggaatcagggagctctctggggtcgctttgtaagaattcaacctactcggttccatggtcatgctaaaatttgtcctaatagcactacatctaacaatgaatttgggggagggacacaaactccagtctacagcatctgccatgctaatgatggccttagagtcacatgggaccaaaggatagaagaacaaggacaagtcaagtccccataaatgagtcctgccgacatctcctctaaaatcaaagaggtcatagataagcagaagacatggttactctgtgtgtgtgtgtgtgtgtctgtttcacaagtcatacgatcacccgcatctctgactcagagtcgcatggttaaggtacagaagagagacagacactcatctataactcggcagtgtggggaggggtctgtaggagaagaatagacagcagtggactaggaggacagccatgtcctcagacagggccacaagtggatggaactcacaagaatgcaatgtgtcaagctgaaaagatgatggccacctgaggacccaggcaggctgaacaggacagaaggaagtcaagggattaaccctggctaaccagagaatgcacagctcactaaaggaagacagttttgtcccagggacacactgaagagcaactggcattggaggggagccagagagggaccacccaggtgaggtggagatgctcttggccagatgtgttggatgtagggtgcaactctgccgagccagccctgaagaatccctaagagcctgtagatggactgtgtgcccaattctccctagccctgctccaaactgctgctatgattatgtaaaattataataagccctgcctgggatgtgaggagaaagctaattcacgcggctgtctcagtgtgatgttcttgctgctatggagttacacagaatacgggcttcactcagaatgcctcccacctaaatgccagctccccagttctgggagtgggggtgctccaatgagtctggggcttgtgtgtggcctttgtttcttcctgttgactaatgaataataaatggtgcctttaagaagcaaagtgtatggctgagtggcaagggaagattgggtatgataagtgatgagcaaccctgcccctcctcctcccccatcgtgtccctccaagatgtgtcaggcacccacactaaactgctttattctcctcatgggaggagggagaacctatgagctctcaggaaatacatgcataaatcaaaggcctattggtttgaggaccagggccacaacttcctctgtctctggcattgggggtaaagatgtcaagggagacgctcggtgtggaccttgcaggtatcacatgtttccaagggaagcacgcccttcacaggggacagggtcctggctccagagcacccctatgtcaactatatccaggctgtgctcctggtgcttcaaacccccgggtcgtctgtatgggaccagtgaaaacccaccctctctacctggaaacaaatgaagtgctgatggccagagcctcttcattgataaggatgccatctcactgattgccggctttatgccagactttgcaggaggctctggctagagggtggggggaccaggcaaacaccatccctgcattcacagactctccagtgggaacatggaaggccagcaggtcaacatgctaattcaataaagtgtggcatggtctccgatagggaactgagggatgctggagaggcagtatgtctcctgagatacagctgcacctaagggagggctttgcatagatgtgataccgtcctcaaaggcccacactttgagacttggttctcaaaatggtgctattgggagatggtagaatctgcagcaggcagagacccttaaggttgtgtcttcaaaggggatttgggattccagcagtacgctcactatgttcttcctggcatacagtatagcttgtttactccacttgctcctgctgcaacaagctgctgtcccaaggacctaaaggtataagattgcctgatcttggataagagccttcagaacaacaaagaaaataaactttctctctttataaatatattgtctcagtatttcattatagtgacagaaagccaactaaagcaaggagtgagggagaggggccatgcctaaaagcaacgtttctgatgccttcgtctgggagaggagcagagaaaggaggcctggagcaaactctcaagagttatagcattgggatcctcagcccactttgtggtggaatgtaagacatcaaagcaaatgccacttttgtaatgagatggttttattaccaatccattccctaaagtaagtgaagcctgaaggcttaaaacaaaatccttgcaagttgattataatgcagccacgtaaaactacaccacattttctaaacactctgcatgctcagtagattccatacattgaacaaaggctagagatatgtggcatggcattctgtcacagtgtgggcaacgacatcaagcctcggctctggactggggacttgagtacaaggaagacataagaagacgctgcaatgcattgtttccaggcattcagtaaataccaaacaatagtcaacgttgttgtcttgatttcctttctatgactgtgggaaataaacaccaggaccaaaagcaactcagggaggaaacatttattttactttacagctcacagtccattacaagaggaagtcagaacagcaactcaaagcagtcactgaggagagactgtggggggacagtactgactggcttgctctccacgactcagcttgatttcttagacaacctgggatcacctgcccaggatggcactgcccacaaagacttgaccctcccatgtcaaacattaatgaagaaaatgcttacaggcatgtctacaagccaatttgatggagtgaatgcctcagttgaggttctctcttcccaagtgactctagttcgtgtgcaattgacactaaccagaacaaccgaaccctcatcaacttgacacacaaacataccactattaaaccataaccttttcttacttgtttatccacaacatcacaatataaaacacaatccaactttaaaagtcccacagtctttcaaaagctcaaatattttaaaagttcagtctcttgaaaacatccaaaatcttttcattgtgggctccctcaccttcaaaagtaagttatagactttcttattccaagaagagagaaccaggacacagttataatcaattcaaagcaaaaccacgccttgatgatggtaacctctattagccacagctgattttttagcttcagctaactagggtcagttgtcctggtaaagcaaaggtttcacttcagtgttgctggcctctgactaatcatagccgattcttccgtcccagctctccagcaaccacagatttttaattaaagtattatatgaattaccccgatagaatctttgcttccctctgaaacttcacaagccaggcctctattgtctgcattttctttcccaaggtcccacagaacatcccatagagctctgagaactaatggctttcctagcctaagttccaaccacttccataaccctcccccaaaatatggttaggtgtctcaccacaacagcccactccctagtttatgtcctgctttgctgtctatggccgtgataaataccattgccaaaagcaacttcaggaatggatttatttcagcttgcagtttatagtccaccccgaagagaagtcaggacaggaacctggaggcaggaactgaagcagaagccgtggaggagcactgcttactggcttgccttccatggcttgctcagccaggcttttattattaatatttttcatttattttacacaccaaccagtttccctccctcctcccctccaattccctccctccaccacccatctaccccacctcctcttcctccgttcattaaggggcaggcctcctatgggagtcaacaaagcatggactatcaagttgaggcaggaccaagctcctccccctggatcaaggctggatgagatatcccagcatggggaataggttcccaaaagccaactcatacaccaggggcaggtccttatcccattgctaagggccccacaaatagaccaagctacacaattgtcacccacacgcagagggtctaggtcagtcccatgtcggctccctggttgtcagtccagagtccatgagctcccacttgctcaggtcagctgtctctgtgggttccccatcatgatctccatccctgtcaaccagtttttgtacagaacccagggccacctacacagggatgataccttcatttttccttgtgatgaaccgcaacctgcaagacgaaataaaccctctcttccccgagttgcttttggtcatggtgtctgtcacagcaacagagcaaaacagaaccatcttgcacagtttcatgtttgaacgttcagtctcacgcatctcatgctgcaccccttaccctttcttttagtactgggggttgaatacagggcttccctacatgctagacaaaccccgccctctcctgccactgagttatcatctcaggggtcttcttaccttacgagacaacctcactaagttgtccaggccgcccttgagctcactgtgcagcctacattggcctggagtttgtagtcttcctgcttcatcatctgagtggttgggactgcaggcctgtaccatcaagtttgtgacactattttgagagctgtgcaacctttaggatgtgggcactggctaggaggaagagctactttgggcatgcctttgagggttctatgcttctggtcccaacctgctgcttcccatctgatgcagatgtaaaagcccaggccacgagttcccaccactgtcatctctgccaagaattccccaccaggatgggctgaaacttctgggatcatgagccaaaataaaccatctctcttgaagttgatgtcagggaatcttgttgtggttatgagaaaagcaactatggggccagtgctgcaatgagcctgactgcatggtcctgtggctttggacctgcttcacaggagaagtttgaaggaatttagaaaggcaggctagagaatggctaggatggtgtgagttctgctaagtggtaggttctggtgagagtggggatggacagaataccaatagaaatatggctgtaagggttgtgctcataaagtttcaaatagatatgaaggccatattgggaacaggactcagggtcattcacgttacagcatgacaaagaatctgcctggatttcagccatgtctttcattgaagttgaattctaaagtcatggattaatttatctggtacaggaaatttcaagccagcacagcacacaggctgtggcacggttatcactggctacttttaaccagatttactagaacccctgagaatagagtagatgtcttagggctttttattgctgtgaagagacaccacaaccacaacaactcttacaaagaaacatttaatgggggaggggggctcggttacagtttcagggttcagtccatcatcatcatggcagagagcgcggtaacatgcaggcagagcgggtgctggagctgagagccctacattttgactcagaggcaacaggaagttgactgctgcactgagtgaaccttgagatgatacctcaaagccttcccccctacagagatgcacttcctccaacaaagccacacctactccatcaaggtcacacctcctaatagtgccactccctttgggggctgttttctttcgaaccatcacagtagagcagaaggatttgtaaaacattcagcaaaggtgtctgaaagtagttaaaatagtgaaccaagtaaatgctgcaagcaaagccatgccactattaaagacaaactgagctctttgccctgatagaagagcaaacttcaaggcaaaaatcccacctattgaagaccacagggcatagaaactcatttgaaagacttttatttgcaataagcgtgtctataaaagaatgctgaaagggacactcaggaaatgtttccccaggctttggggtacacagaatccattgccaccatcatctttggaatcctggctatatcttgggttgctaacaagaattggtgttgtcgtgttctctagaaaggcctgtgctctttctcagcatagctaaaactctgcctctttcccctagggccctcagaaggatccctgcttgcagcaggtctcccctccaggaaagcatccatctcttcagccttctggcagcttagaatcgtatctttcccatcgcaggttgtccctcagcatttcacttctctagaggacagcagaaaccattctgacccacaacttcaactgattgatttccttcctctgggccctgagatcagctcaaacagcacatagctccgagctgctgagagatctggggctccccagcctgctctgttgggacagaccagtgtctcaggaacagtgattagctggaacaatacaacaatcagaaaatgtcacttgaggatccgtgttcataagattgcaaagagacaagcggaagacagggaagctattgatgtccaaaacaccagctcagaccagcacacagcacagccactgcaaaagaagagacaaaaccagtgcacagcctccagggagcatgtggcctttgaccacagatgtcatcctgccctgtatgtcaccacttgtcacagctccatcctccagccagtgccacgttcacttacaggaagctctttacaaagtgactgagagcactacagaaaatgtgacttagaaaaggctctatgcccaaaatgggcttccaaaagtgggtgtgtcaatgaatacaatgggccctgtctatcagcaagttccacatccataattcaagggcagattaaaactcctcaggaaaagaattgcatcagtgttgaataggaacaaatttctttccttgtcattgactccataaccaatgaagtgaaacaactcttcccagcatcagcatcggtattctatggggcaccatcaataggctagcgagggtgtagagtgtgcaacaggatggatataggtcctgtgcaaacaccacaccgtcttatacaaaggtctgacacatccagacatcttaggagggctctgaattcaaatgcccataaaggacaattatgttcatattcatatgtatctttacaaacatacatatatccttatatatgtattcctgtattcttatatctacactctacatatatgcatatattcctgcatttatatctatatttcatatataattatatgcattccaatatgcatgtgtatattcctgcacttatatctgtatttcatacatgtgtgtgcatatatgttcttatatgtatctgtgtatacttatacatgaacacttcaatttaggtcctacactagtctccagatgtctacaggaatctacatatatgttataaagaaagctttttcttgatcataggaagttttcgataccatttccattcacaagaagaatgaaaaacagttggactccgataacatgatagcatggtaataaccccgtcctctaacgtggcagtagggtattaaaccagtcttctagctctaccaccccagaagcatgtcagaggctaatgctgcctcataacttggacctctgagccgtctacacttcctgttccacctggccctctgcagcagccagagacagcctcccttatccagagtgccccctacaggcagtggctggctctctctccctaaaacatttgtgacttatgtacattagggaccctcgtttattttgtactttcattctaccttgttcagttttccttccagtgacctcctacatgtcaactcaagaagtctggccttttgaattttgtctaccccgcccccaccagacagaccagcccatccgcattaacaagagtttgcctctttcaaatgatttagatgcagctcgctattactttatctttaaaataaagaaagggaagaaatagtcagagagaggcacttaattaaattatattaagtgattagaatgtctaagagacttcttaagagactatctcattccttctcacgcccaccacagaacattcggggtttccatggcaataggctggttggtaggaataaacatagcctagcacctatgctgttcagggatttcaaacttctgtctaccaggaattcctcaagccacgggtcatttacctcagccagagagagctggacaatgccgttctggttcttgtccaaaagcctgaacatttctgaaacaccagagaaggaagcaagttggtcaggtctgtttctgggttttggaacatcagaaaattgtctctggacaacccacacaaagctgcaagtcccctttccctccagacgtcgtctaagcccagggaccagcagtcagagtgagcttctgtggctgcaggtgtctcccagactgaatgaaaaaaccaatttgtcagcagagatggttcctctggctcttcaccttcagacgctcataagaaactgaaagttctttgacaagtgggttgtggatagtccagtccctcaactccatctctggccaactgattttgctcctaaggcttccaatcttgcactctcccaatggaaggaatgcccctccctttaaaagatggtgtactgattataagacagcagcaccctgagacccaagaaaggaatacagctactgccttcctgagggagcccactctcttcctggaaggtggcacagtctctcaagtgaccctcatggtgccatacagatgaataaacactaaaagctcctaacccaggaccattaagagagtcaatgccttggcctagtgactttgtatagctcaataattaggataacattctccaggtctccaaggaaaagcaaccttggccctttggtgtgatcagcccagacatctgtgtgtctacctccctactaccctatagtgtctacctccccttccttctgggtaacacagttataaaaattctagtcccccagctccaaagcactgccaggcctctcgcctcctggccttccatgctctgtgtctctgaagaaaagaaacgaggctgaagaaaactgagacttactgaacaggttctccaggcggatcacacaagccataaaaccatcaaagtcgatgccaagttcgctgcttgcatacctcatggcaataatatcctgcacctggttgttgagaatgaaacctgatgacaaagagagactgtgtctcagcatcttcctgataaacttcaaggtgctggcatcacgggggccctccatgattatgtgtaaatctgtaaatcaggactactctgcctctcccggggaggtccaggagatgctcttccaagtctccactcttagagatgtctcaccagctctttccctggtcaaatgccagctcatccctaggacagtcatggctacacaacagcattaagtgcgagaagacagggtaaggggctttgtgtctgtggtgtctgtgacagagcctcacaccttgtcaccactgtcactgcctcggtaacaggcggagtgcagaacacagcactatcctctccttcccagatagaatggatcctcagcaagactttgttgtcacactggcatccaatgaagaaagctctcaggaatgacccttagccgctatcatgagaacaactatttacagtgggcacatctgggacctaagactacagggtgggtcctcacctgccttcttgagagccgttctcatctcatgggcatcaatggtccctacacggttgtggtccatttcctggtagatctcctgaagccagagagaaattgcacatggagaatcgcacagccctgtacaacaatttcctcccactttactcctctcttgggaggccaaggatgcactctaaagagactgtattgatgtcttcaaagaagctccagaacaaatagaaataggggtaaaggtcagtgtagcactttgtcctctgaatagcgttcccattggaggggttgacatcagtatctcactgccattgccttctgactctcttttgaacaatgtgcccaagttttgactacagtctgggcagactaaggtctagaacagtccagggatgagtattacacagggtcaaaggggggaaggggccaggacccagagaaatgcccttctctcccaagagagatagaaaacaattagttaccagatacttgcaaatcttcagccagagtgccttgagctcctcaggtcccagggtcccattcccatcactctaagcttgttaaagaccagtatcagcaaaccctgaatcaccagagagttttgtcctcttataagctcatgtgagtgccttgaagccttagtggaccttccgtatctgaagcaagtcacacaatgggatgatggtgggaaagccagaggccaggcacagaggtaagaacaaaccacagcctgagacctcctaacaacactgacagcgtacccttattatcctgggtgacagcggctgggactacgtggcttatacacttacttccagactaaaatttctatgattagtgcaatttctcattcaaataatgttagtatcatcagaatgtcaaaaagaaataccaggtgctgcaaccatggggtcttctcaaaggcacaacaaaaccgaaagaggtgtgaacgttgggggaggccatgtggaattttccatatcttctgtatcttccttccaagagtacttactgagtgctgaactagacatgggggtttggttttaaatcgcccttaccctcataaaattcagtctcttttctcaccaatcacaacaaagcaataaacatcactgtgttacagaataaaccatcaatcctccccatgtatgttagacagccaaataggagtttgtacccaagaatgtaaagcattctgttccaatctagatttggagtgaccaccaaaggtccagctgaaaggctccgtgcccagcagggcactcttgggaggtggtgaagctttgaagagataggtctagtagaacacctcaggtcattggaggcacgcccttgcaggggatgttggaccctgcctcttcctctctctctctctccctccctcctctctctctctctctctctctctctctctctctctctttctctcacttcctggatgccgtgaggtaagtgttcatctcatttccaccattgtgtgctgcctcatcataggtcagaacagccaaaattgtgaactcaaatctttcctattattacaatttcattatttcaggtattctgttaaaattgtggaaggctgactaacgttctcatcctgtcagagcatccagtttggggctgtatttctgattagtgctgaatgttggctggaccacagccttcacaccctcactacaacataaacaaccagtctgcacagagaactgaatgttggctggaccacagccttcacaccctcactacaacacaaacaactgttcttggcagggtattgggctcagggaaatagcaccccaagtcttggtactatccatgcttgcatctcctatcacccccacaatggctgtacaaactagacaatcttattccattcttctccagtaaaagaccctgacagtccaagtatttagtaacttctctaaatgtatatacctggttagtaaggatgacagaatttaacctttgtgtgttccaaagtctagatagacttactgaatcagggtctccagaactgaaatttaagcaatggcattttcaagtttccatgggtgagggaatactgatgtgtgttctagtacttgaaacatcatgctaatggaagcaccatctgctgtaggattccatgggtacacatgtgcacaatactcagatttgcagaggtagacgatatagtagcagctgccatagtatggggatgggggaataaagagtgactgctaatccaagagcagggtttaggtggagtgggctggcaaaaatgttctaaaccagatggtgatggctacacagctccaaatctaacaaaagccacgaatgcagtgtacatcccaagtaagcatgttctaacgtgtgaacacatctgaatagacttgccatctttctaagtcctcaggggcattttcactgcacatggagatttaagcccatgtgcacactcaagacgaagacagagtcaccaagccagcacgctttgcagccatgagatccagtgccactgggaacaatgtgtgggtaactacaacagaatctgagtctgaattgaaagcaacaggaatctttgacgatgacagttctgaaaccaaggacctagtcacagcaaagtgaagcaaacagttttctgaactgttaaccacactcccatggaaggacacaagggcaaaagactccagcactattcagctagtggccacttggggcaccggggccactaaacagcaccacctacccatcaatgatgacttgcacagaggttgccacacactccactaccctacacaaccctgccatgtccaaaggaaagtcactctctgtcctcaatggggctggagaaggggtcctggagtaagttatcgtcatgaatgaggtccttaagaaccaaggagagccttccatgctaaaggattcaccttcaccaccactaaatgttgaatggcccctggacttgcccccaggcaaagcttaagaaaatgctgttgagccattggtagcctgtacctttctgtagaatttccctggcatacagaataccctttctctattcttcatggaaactcctacccatttgtagcagattgagtgtttatgtgccccccaatccacgtgtcaaaatctaatccccgtataaaggtatcaggaaatggggcctctgggaagtaattgggccacagaggggcacccttcatgaatgcaactgtgctattataaagtaagtccagagaggtccctttccaccttgtgaagctacaaccaggaaccaggagacaagctctcactaacacatctgccacatcttggtcctaggcttcccagtgcctcaaactgtaaggttgtctattatttataagcccacggttaaaggtcttgttcaatagtattctggcaaacactaaaaagaccgatcttcaataggagatgagatcagagagaacaaataggttttatcttgtaccataatcctgaactattggcagtggatatccaagggccatgttgagagtctgaagaatggggagagctgaggagagactcccgtgagggtggagagttggatggatttcagcaggtggaggtactgggatcacacagtgtggaggaagaatgggaaaatacctccacttgctgtctctaagttccataattttagactaggaattcaactatgaatatcttggttttttatgaataacttggagatagtctcgagtgtggtaaagacaatttgcaaaatgacacatttttctttaaaactctaacacaattcctaacatatgatcactaagtatgtttccttcctcagtttctcccctgccctccctccttactggaaaaaggtagaggagcctttaaaacagaaaaaaaaaaaaaaaagatgtgacatttaaaggatacatccagcaggctgatcatttctctgcaagtgttgatgttgaatacatcaaatttcatgcctgttcctaaatatttaaaaagaaaagaaggtgggagtctgggttgtttgaagaaagggaaaataaatgatctagacagtcagtaagtgactatcaaagagagtacaatttcagtggaaaaggttagagcatcatgggaggctcgggacagataccaccagcctcttggtaccctggcatgtatggtgctgaccagcactggcattgtacttcagctttgatacccacgggtttgtgtttataaacttacatttcaccttccaatggtgacattacaatggtgagaatgatgctattgcaaccaagaactggttgaatcacaggcatctctctggagctccagacatccctgccctctaccttcacctggtcactaaagaccttgtagccccctcctttcctctctgctctaagccatagaaggagagcagagagcaggggggctagcctaagctaggacagagctctgagcccagagcactgctcagggccctgcctgtctcctggctgtcgtgagagcccatcacccaagcagatgaaggacttaatcctggctatgcctggaccagaacagaaagtgcctggctccgatggcactgaggcttgaaatagggaacaacgccctccttggagaagaatggcagaagtctgaagctttgaacaactcaggataggcaagaacagtcagaattgcccctcctacctactttcccaaagaagctcagtaaaggttcttcaggcaacattaattttgtaggagagtgtcacataaatcaaacacagcccagcttccctgctctcgggacttacaaataattgcatttgatgtcaggattcttggtcctgccgggtctgttacttaccagtgtgagtcttacctcgcccagtgccgcccctccccagatgctcctacaggccagatactcaccatacagagttgggatctctaaagctggaggcaccctgaacacccccctcccaacacacacacacctggggtacttctggccaacctctgtctgtcccctctctcagccccacctggcatctctcttggatgcccatggacttgctgattggtcccaggggagaactcacgtgtggataacacttcattcagggctctcttgagctgattagcactcatctcagaatcctagaaagagccccaaagtgaattgcatcagaaccaacaagctattccatggcatccaattaacgtagggctccctcccaagtcagaatccaggtccaccagccctttgatttttcaaagcatgtgatatttagaaactcaacttccccattccctctggggtccagcagcccggaagagcacagaagggttagtggggaacatggagagatgtcgggaacacagagagatgtcgattgtacaacttggcacctacctctgcagacggctgccagaccagcctcttgctgtgtttcatgggacttgcttagtcagagaacagagtgtgacaagcagtgtcaacgggaactagcactaatgtaccacacgcccaacgtgcagcatcattaaatctttaacaaaactgcatccatgctacagttaaagagccatgtctacagaaactgctaatcattgcacacacatacaacagcacggatcattgtgctgtatcggcttggggctcacaggcaccaagtgccagatttctcacgtgtgtgtgaatacatttcaggcaggaattcagattcaggggatgaagcaaccatgtgtatgtggtgtgaacactgagtcagagagaatatgcacatcttagcactcagatagaagataagcctcacgcaggatgagggacaggggcacagtagaagctgtgggctgtaagctgagttccagtctagactctgcccatttttcacactctgaccttagcctaatcactctggtcctcatgcactcccccagccaggccctagcattgcaaaggtgagaccagcatttcgcaaagcagtgtctctggatggtctccctggggcataaagtgatcagtcctagagtaacatcagggacccctctgaaaaacctctccacagacaagctaatcagtcgttcatcggccaggaagaaatcgatgcccagagttcttactggaccttggctgtgaccttcaagaggccttgtgactttcgaccagttccttagccttctgtaactttaccagcagaggaggaactagggatccgagtcccttctccatcacccctcaaccacagagaaacgtaagacaagcttgggaagaaatctacaagcaacagtgttttttctggtgttttggatgtgctaaataaaacatggccccttggcagcggaggacggaaacaagcctctgctgggaaaaacaccggcctagcatccacacagtgctaaagggccacattccgtgggagcactcgccaatggccacttggggggggggggggctgctgacagggtcactttgctttgctgcaaaggtttctggtgtattttgtggggttttttttcctcctattcctcccacataccctggcatttcagtggggtaggaggttcaggcaaggcagaaagcatagcttttcccttctcagggtctttttttttttttttaagcattttatgacccatcaaagatgttcaatttctatgaggccagtggggacacactgagtcttgagtgagctcagatttatgactgctaaatgactgggaccaaaatggaccctggacaggagggttgggggtgggggagagagagaaggaacaggggagtgtgggaagaacagctgtgcaatccctgatggtaatcacattcatacacacaccagagacagacttagatcccacagcacagctgatctccagtgggccaggctgctgcgtgtgtctccatccccagggcaggttaactgagtggcctcctgccgaggctgggcaattccacctctggaggctatccatttaaagcggtcacactgccctggctttctagtcagaggccccaactgacaggaccaatttacaaactgaaaggcttttggccagacccagagattgggcttttctattttctcaagtcagtcaacgcaggaagaaaagtggcctctggacaatagttattctctctctcctcaaaacacaggaaaagcctgccggcttcaggcaggatgaagtgacaaatgctaggtacaggctagagacccagagtgtgcagcttcgccctctgtgcgactgcagaccagagggagtgcgggcctgagcctgctgccactcacccgcccagcgtggaagccacccgccctcaccttgcctgcgaactcctcaaataggctccagaaatcctcatcttctctgtccatgtcacatgggtgtggctggaaagggggacagtgatgacattaaaacaggaactggggagagaaacatggagaatcccaagtaacccgttagcgtgtgctgggccaggcttcgggctaagtgggggcacatggtggtatgaaaaaggtccctcacagtcacaggcatttgaactcttgtttcctggggaggcttaagaggtgtggccttgctggagggactatggggttaaaagcctcattctgcttgcctttcggcctctctgctttgatttacgtttggagagtgagctcccagcttcctactcttgttgtcctggctgctcttttctctatgcctccctgctgagatggactcttatccctctggcaccctaaacccagataaattctcaccacagttgcctggggcacagtgtcttattacagtgacagataagtaatgaatacggtggtaaggaaggaagccacccagagggttggcagtccagagctcctctcggagtctacagtccctgaatttcttcttttaagacttatttaaacgttatcggtctctatgtgtggggaggggtgtgtgcatgtgtgtgccgtgcccacggaagccagaggcattagagccccaggagctgcagtgacaggcagttgtgagctgccctgcatgagtgctgggaaccatacttgggtcatctgcaagttatcttatctgaggaaccatctctccagacacctaagccttgaattttgggtttcaacccagaatcactttcagagaacaaccaaaacagacatagggaagtctcagcctgggtctagagaatgtctaaggatttcaccaacaacctcataggaatctgaactccagaaattgtatgaaaaatgtgagactgtttatatgcactttcctagcttttacagagtccaaaaaaaaggctaaaatgtagttaagatcgcagcctagtagatacaatgctaccagaagccagtagactagagtcgaagtagacaggctgcttgctgaagcctatctctgcagaccgatcacccccttcctaatgctaacattaaactccctaggaccatttcatagcatcattttgaaaatcaaatgaaagctaatgtgtgccagtcctttaaaaattacaagccattctataaatgcctttgaccgaatgctttcaaaattatctctgattgtcatcaccacagaactaaaagggcaaagcttcccagatagcctgaagagtttccagaaaccaggtcgatttcttccaaagccatccctagggtaagtacacaaagcccaggatagcttaatgatgctgtaatcataagttacatcggcaggaagggtctcatctttatttacttcctgtgacttagtgcatccacgctgtgagactgtctcatcactatacacttctcgtatatggggagactgaggttcagagagttaagtaatatcacagaaagattgtaagagccagaggtcggggaagatggctgcaaagtggtatctgctagacacgtgaaggctgatacgctcatgagctcacagctgtgatttgcctatacaaacctgtacaagatagagcgcgccagcatgcaatgtgggtagtgagaggcgtgtgagaccctacgcctaaatgaggaggttttggcaggtgatggatgccgatggagggaaggtctagttttcttcagttgtggggctgtggtagattgcccagttacgggcagcactaattgtaccaagagggttatgaaggaggaggaggaggagaaagaaatgaaggtggagttgggggttggagagaagatatgggggtggatataatctaaatacactgctaaagaatacataattaaaacacaaacgtaaacagcggagtggcaggggtcaaggtcgcacagataaatgatggaaccacgattcagatgtccttctctaccatcctctagtgtgacaaccagaggttgctgaatgaattaacaaatcatgtctcagagatttgtacaggaggaaaacacccattctggtaggccatgggacttcctgtctcctacaccctgttctcccagactatggggctctacacagggctactgatgctgccatcacacgaaagatgcacaaacacaaagccacacataggttctttagaaggaaaaagtgacagtttcatacacatgatttaaagagccttttcaggggagaaagttgttatattgttcatgtaatgtactttaaagtctagtggcaagcccatacattctagacagagcataatattctattattctggggagaaaatgtatgaaattgcatttcaaagggcagagccaagtgaggtggtgcaccctgaatcccagcccctgtgagacaagggcaaaaggaatggctgctcaaggctagcctgtgctacatagcaagaccatgtctcaggcgcacacataacaccacagtctatgcatgtggatagatgctgtctgcatcagggttagtgggacaagcctaagctaagcccaagcttttgtcattaatagtaagtctcccggtcattatttgggggctgacaagaaagtgctccaccagcatacctcgtgtggggctccagctacagcatgcccaatttccctgaaattcagacagaaacaaatcaaacacgaaaaagcaagtttagccaatggcccggttctttcagagagaatttcttctaatgggaaattgatctcacacccaggattttcagttcctacttaaaaataactgtttagctgagcccctaaaaggaacccttccccttcactgcccaaacacacaccccaccctggagttttcatcagacataaggtttagtctgctccccctcggattatagaatcccgatagcccatcttaccccaggctactcttctgtcttctacaaacctcactgccagaccctctgctggcctcatggagaaagtggagtgcgggcctgggtacatggcaggggctatgcagtatgtatgtggtgtgccctgaggatttgtggtatggtatgtgtgtatggtacacgtggtgtgtggtacatgaggtatgcatataggttctgggtgtctaagtgaatattatatgtgtgctgtatgtgtagtgagtattgtggtgtgtgtgcaagttacgtattaatggtatgtggtattgaaatatatggtatgtattatgtatgtagtgtgtgctatgtgtgcacataagaagttgtggtaagtatatatggtatgtataatatatacttgtataatatatgtgttttgtgtgttgcttgattgtgttatatatttgatgcatgtattgtgtacatacgtgatatacacggtgtgcatgctgtgcttgtgtatatgtttatctatagtgtgtgtgtggtattacattgtggacatacagaaggtgagggatgcatggatggcacatatgtctcatatatatatatatatatatatatatatatatatatatgatgtgggttgtgtgtaatgtgtgtaactggtgtgtgtatgtgtatggtatgtatactgagtgtgtgtgttgtgtgcatatcccttccccagatctcatcagcctctgccaggcagtaggacaactggtctataggctgttgatggtgccctgtctcgccagcctcgacgtttctggaggaggaaactcccagtactatagagcaaagaggaggcagcaggaggcacacccagggaaggcccctgggaggcgtcacgctttccaaacttcctctagaaggatctacccggatccagggccaggtcattcagcaactggtgcctcccaatgctgcatgtccacctgcggcctaattcagagaacgtcccccacaaagtagactcacagagccttggccttcttttctgagaacaccctcaagcagaagtcaccgtccttgaagggctcaaaggtagatggcaccaccaggtactgtcctgggggcagttggacccggctggacacttcccgcaggttcatgtaggtgctggagcaggcatagggctggtgggactggaagaaatcccggcccaggtgagcctccgtgtgactctccagctgcacaaagcaacgcgcagagtcagtttctccctggagctcagcccaaccctgttgaattagagattgttctctgcacctgctgtgtaagaactgagagacgttcagttcagtcacaagctagctcactgcgtctcaaccgtcaagcggattggggtacctcctgggtgccaagcccaacgaggctgtggccttaactgtgacattgaccagcccctctgccctctaggcctccccagctaaatgaaaggtggagcttggggtatctagtgtgagctttgcatattttccctcatgattccagcagccaacactctgtggctgtctctgtgagaacagcgttgactctcacagtccagaccaggggctggaaacttcaaccctggtcctcaagcgaagtgctctgggagatgaccagattgacagaagaggtggctctccaagccctccctgttctgcatccctcctagcctcctgggggtcaggactcttccttagagtaagatgtgcccacgaatttgttgtgaggaagggtgggaggatgctgctagtgtgtgacacgggctaattactaactgcggagtgctcggaaaacacaggtgccagcatcattagcgctgtaattaagcctccccggccctgtacctttacaatcaatctttatatgacgcctatggcagaggcaggtgcaggcaggctgcgagagctgaaacgcccacactggagcagccagtgtccatgcatggtcacccgttctggatctcagttctgctgatcaggggagaaaataggactcccttgtccccctgtcattgccctggtgggatgccttggggatccttccaggtggcaactaggacaaccacaatgcttcagattatctctgaaaatgtataccctgggcataagagtgctggggcatcaccagggccacaagcaacatctgagtgtaacaagttcaatgtcattcctggtatccctgatggaaatgaggggagaaagagtccagctggagaaggtgctgtcagtacagatgggcggctaactgatatctgggcttggctgggcaaacagagtttctgggagaatccaagggtggaaccaaccaaagaatcctcctttaggaagccagagtggggtgggacctggagcccctgaggcaagagctgggttcctttggtgctgtcagagaccccatccagctaggtgtcaagggtctctggccttcacatcgtcccttgacctaactcaactagcaatggtggtgtgggaatcaagcgggctcagctgagggtgtttctcagaagtgtgaggccaaggtcaccaggtgagccctgcagggtggggcatgtgcaaattgttaggcccatcccagtccaatagagccagacattatagccatgaggcccaatggtctgtgatttaacagtccctccagagatgctgaggccagaagactctgagacacttgcagatcgcaggatctacaccaagggcacactgggtgctcctggggagagttctaccactcatacataggaccccacactcatatcgatggggcatctctgatgggagccaccattaaccacacttaactcaggtttggtttccattgctttctggtagagaaaataatgcagcaagccacccacccgtctgttccctccataataaacagcatgcatttgagacccaagggcctgagagaccagtagtctgcaatccaggaacatagcctgggcccaagcctatgcatctgggccctgtgggtctgcccacctccctgatcaaggtgagaacctgggagaggagaggaggcagcagcctgtcacatggcactgcctaattagtgcaattgactccaagtcaaaacccaggcatggctacacactagagttgaggggctgtttataaacctacaatgtctgtattctcctgaccccaagatgctgctataactcgctgggatggagcctgtacactgtgatttttaagacttcttaggctgcagctgagtttatcctggcctagcacactccttgctttgtgctgactgtgctcttctgtgggaccatgcaggtcccctctctggagtgtttccaggctcctaccttcaaccggcggaggtgggtggtatggctgaacaaggctcaggagatcaggagatcaaggctcaggagaacctcagaccatatggacactactggtaaaattccctaagataattgtgaattactggggagcatggaacaagccagcgcagagggtgaagttggcacttctctttctaatcagacaccagggcattctctcagcaaagcgagagcggtcaagggaccatgggcactcctctaatttggagtttaaaacacaatcagccacacagaggcctccccacccctcaggagcttccagaattactttggccagctttccctcagtaacctggacacttcagacaaaatgctctgagtctgcctggccctgagtctcctgggccaggcaggaagagccactgcccacagacactggaagggcagtcatctgtgaaatgcaagattctgagtgggtgacaggaggagggctatttagccttcaggggtgcctggcagcttctcaattggtcacaggttttcaacctcaggctagagtccagcttcagacagttacagccagagaagggagacacaggcagggatgaaaatacatccctaactagccaagctactcctcacaccctgcaactcagctaatccccacaccccaggtgttctcctcacctgggctgctccccttgtcccagcttctccccacatccatctcctcaatttgactttaaaaccaatctgttctcagagttcaaactctaaattatatgcctccaatgacaagaagtgggaccacagatcacataccctggagtattttataaacagctataattttgctgtgtgtattatttattggtgcaaacaccataccacacacagctattgagaaagaatgtcttttgatctggcacaatgaaacaggcctgacagatgaagcactggccaacatccctgagtggctcaccctataaccgcccctgccaactgtcagttctctaaaacagtcactaagttttgagctgtcagggagcacatggcatgccttcgggctagaatgttctctcttctccaccttttaaatctaggtcatcttttgaagacctgattaaagcctcccccagcatgacactgaggagcccagactgctgtggtggtaccaccgttacaggtccccctgccctgtcagcaactgggtgttttggctgtcccattcctgattgggagcacccagaggacagcactatgatgctagtcctcagtgtccccagattcaggttctgcacatggcacagagtagatgctcaggtaagtttgttgtgttgggatgaatacagggctattatctctgcatgcagtgagggtgggtttgcagtatttatgcctagacaagactggaagaactaagttggaataaaatggagcttagttattcaattcttccctcttgtcattaagtagcaattctttcccatctcccatccttctaattgcacacacacacacacacacacacacacacacacacacacacacacacattgttagtgttggaaggtaagcctgtgggattgtgtaggattgttaatttatataataagacttgcctactgtgggtggcaccattccctatctagtatcttggaatatgtaagtacagaaaaggagctaaactgtgcaatcaccactctcttccatttgcagacacaaaatgaccagctgcttcagttccttctcccttgacttcctggcatggtgtgttatacattgatctgtagactataacaaactcttccttgttcttgtcagtatcactcacacacacacacacacacacacacacacacacacacacacacacacacctgaaaccctaagtttaagaatatgataaacagagctggaggagaaggtatgggcttggcaactgaatttttccgtgttacagaatttataacaatacttcttattataatgcttatttatgtacattaattttttactgatatgttgggcctcctagcagctctgggtctttctgattagaattatgttttgaaccaagaaattcacttgcaacaaaaccataccaaaaagcaaaaaactgaggcccagtgggatacattgtatggcgtcttcgcctaggtaaagaaatagactgtagcatggtcctagctagattgtcaagccctgaaaacttgatttattgcatcaggaagacaaagtccacagaagggtagtcaccggagaaggctggcgtcctgaaccaggaactgaagcctgagacaagaactggctgtgttcctcaatccaagaccccactaccaaaaaaaaaaaaaaaaaaggctgtgtcattccttgtaccctagctggagccttgtgtgttccaagtgacttcctatgataggaagaagggactgtacacatttggcttctatatccagccaccttcccccattctgaagtgcattttatgactcaaatgtattttaccctcatgttctgggctcttgtcccctgagatacccattcttggaaaaaagtctaatatgcgcatttgtactgagttctcactgacaggcaaagtgtaatgaattgtacatctcagtgttagccgcagaaactccagccgtagggatgactctaattatggaatccaagcctcagtaagagctctagggatgcaaggaaagcatcttattaagagtatttgagcagtaggaaagatgcaccccaactactgacagaaacatccagatcaaagacatcagtgcaccctgactcggctgtacctggtagatagcgtagccaatgctgagcatgccctggccaatcctcttttgtcgcctgcgattcttctgcattaaacccagcagcactgtacagcagggttcgctggtgccctcttcctggtcctcatccacctcatccaaatagattttgaactgggggttggtccagtaagtggctggaaggcatccagtgacagtggtccaacaagggtgaggagatgaagaagggaaattttcaaaaaaggaaagagcctccattgtcccaatgaaagactagccctggccagactgcctggcacagcggaactggaaagcagcccccccacttccctgtcccaccacacaggtagatacttaggatgtctatcttgtctgcttgaccaaccagtagcccaaaacggtggtgaaatctgagatcccgtcatcccaggctgcactgggctgcattgggaagcaatatcttggcttcctggaagtctttcatttctttcttctattagctgaagactccacttggaaggagctctttggagagaagtgtatctctgggatggatgacaactgagtcacagaagaaccaaggaggcctctgcctaatagctagaaagccatctgactgtcgtgtgctgcaccaagaccaggagaagccccagatttggatatcaattccatgagacccatcctctatcctgcaacccaagcaacctccctcgatacccagtgttgcagcctactgtggagacaggtcattcaataatgtaagagaaattacaatgtattaagcattcctaccacacaacctgttgatatttaaaaagatgcctttttgagtcggggagattgctcagtgggtaagggggcttgctgtgcaagcaagaggacctgagttcagatcctagtaccatgtataaatgtcagtcgtgactatgcatgtgtgttgggggatattccatcactctgtgaaccctgagtttgcatttgcattaattaagtaaaattaacctttggtccgggggctgagttagcaactagttgacagaaaataatcaccgagcctcagagggcatccagaagagatagagagacacaaaaagtagtagggtggggtttggagtggcgcagctttttctggtttgtcgaagcagaagcatgagtcttccatgtatgtcagcaaggaaaaagggttaagtagctgttactcagcctctctgacctcacaggttttcaccccatcctttatctcaaatattattcataattaaaatgatagagatttaattaaagcttccttcagtggcagcaacaaggttggtgcctgctggagcagaattctcaccaggctgcagctgagcagccaggacactgttagagaaacaggctggtaactacagatttgcaatttctggctgagatagcagtagattaaggcacagccactgtgccaaagttaaaacaacatttggcacccaacacggggcacatatttctacatagggtctgagaaagccgaaaaggaaaaagacatggcttcctagtagcctgatgcttgtggcatacaggggtgtgacgttgccatacagcaagtacttgagcaaccagcatgttaagtaaaaacaacaagctaagaaaaacacctgccacagtgctggcaccaagagctggggcagttaagtgcagctcccagttaaacacagatctcagttaaatgcagctcttgatcatgccccccaggacataaagccctgctcttacagacctgaacagggaagagccagccaccagcacaaagccacttggcaagtttaaggtttagctcacctggtcagagaatgctacaggtgcacagtaaagcaggtccagatcaagaaacacctctaaactgattacagtgtattaaaaaatgtgcataggtgcttaagaaaaaaaaggtatagacagtcatagtaaaaaaataaatagtttagaaataataatgtcttttaagagagagtaaagtcatataaaggaaaagagccacataaagatgggaaatgcgctagcaggaaacttcctggagccatgcagcaggcttggttttacagtagaacaggcaccagtgaattgattgctgtcctgtgagtattactgtagaggcttgtgaggggagcatggatgagcccagaagacacaacatgttgaaaatagaagtggccctgttcggaaacatctgatgccaggagtctgctgaccagatctgaactcggtggcgcaatccaacacaccccgacactgccaaggccccggtaacagtgccacctccatccacaacaagaggacagacataagaggattggaactgtttgcatctaccagggaaccttggtcccttacccaccaggagaggaagagactcctgctacacctgccagaataaaggatgagaagaggacaatgtaaaagcacattcaacaacagaaaacccattatgacaccaccagagactaggaactatacaccagcaagacctgaacatcacaatgcagatgaagcagaagagaatgaccttaaaaacatcttcatgaaaatgatagaggacctcaaagaggacatgagaaaatcccttaaagaaatagaagaaaaaagaaaccaaaaatacaagatatcaacaaatctctcaaggaaacagttcaaaacctaaaaacacaaaatggagacaataaagaaagcacaatctgagggaacgctgaaaatagaaaagctgggtaaaccatcaggaactacagatgcaagcataaccaacagaatacaagagatggaagagagaatctcaggagttgaagacacactagcagaaatagattcataaaccaaagaaaatcttaagtccaacaaatccttaacacaaaatttccaggaaatatgggatactgtgaaaagaccaaacctaagagtaataggtatagaagaagatgaagaaatccaactcaaaggcacagaaaacatattcaccaaaatcatagaagaaaactttcccaacctaaagaaagacatgccaatgaaaatacaagaagcctacagaacactaaatggactgaaccaaaaaaaggtctccttgccacataataatcaaaacaccaaacataccaaataaagagaaaatattaagagcaacaaaggaaaaaggtcaagcaacatataaaggcaaacctatcagaattacacctgacttttccatggaaactctgaaatccagaagatcctggatagatattctacctacactaagaaaccacggatgccaccgggcgctggtggcacgcgcctttaatccctgcactcgagaggcagaggcaggtggatcactgtgagttcaaggccagcctggtctcctgagtgagtgccaggataggctccaaagctacacagagaaaccctgtctcgataaaccaaaaaaaaaaaaaaagaaaagaaaagaaaaaaagaaagaaaccacagatgccagcaaagctttcaatcaatatagatggagaaaacaagatattccataacaaaaccagattcaaacaatacatatccaccaatccagctctacagaaagttctagaaggaaaactgcaacccaaggaatttaactacaaccagaaaaatataagcaatagataatcccactttaccaatagccaaaaggaaaaaagggatagaatcccacacataatttcgccaccatcaccaaatcaaagacaaacaaaaatgaacaatcaatggtcattaatatccctcaacattaatggtcttaactcgcctataaaaaagacagagtagcagaatggataagaagacagaatccatccttctgctgcatacaagaaacatacctcaacttcaaagacagatggtatctaagaattaaagggtgggaaaagattttccaatcaaatggacccaagaaacaagcaggggtagcaatcctaatatccaacaaattggactttaatctaaaatcaatcaaaagagatgaaggaggtcacttcctactcatcacggtagaaatccatcaggatgaagtctcaatttggaacatttatgccccaaatacaaaggcatccacatttgcaaaataaacattactaaaactcaaatcacacataaaaccacacacacttatagtgggagacttcaacaccccactcgcaacactggacaggaacaccagacagaaacttaacaaagaaacaaaggaactaatagaagttatggcacaattggacttaacagatatctctatagaacattccatccaaatacaaaacaatttaccttcttctcagcgccacatggaaccttctctaaaatcgaccacatccttggcaacatagcaaacctcaacaggtacaaaaaattgaaataaccccctgtatcctatcagaccaccatgctttaaagttagaattcaacaacaacacgaattatagaaaacctacaaactcatggaaactaagtaagacccaaatgcacaattcctggatcgaggaagaaataaaaaaagaaattaaagatttcctagaattcaatgaggatgcagacacaacatacccaaacctatgggacactttgaaagcagtgctaagaggaaagttcatagtgctaagtgcccacatgaagaaacaggagaataatcacactacagaattaacagcacaactgaaagctttagaacacaaagaaggcaatacatcccagaggagcagacaccaggaaataatcaaattgaggactgaaatcaataaaatggaaactcggagaacaatacaaaaaatcaatataaagaagagttcgtacttctagaaaatcaacaagatagacaaacctttatccaatttaccaaaagcagagagtgaacatgcaaattaataaaatcaagaatgaaaaggggcacataacaacagacagagaggaaatccagagaatcatcaggtcatacttcgaaaacctatattcctcaaaattcgaaaatctaaaggaaatgaacaattttctggacagatttcacttaccaaaattaaatcaagaacagataaacaatttaaatagacctataacccctaatgaaatagaagcagtcatcataatctcccaaccaaaacaagcccagggccagatggcttcagtgcagaattctaccagaaattcaaggaacagctaatacaattctcctcaaagtattccatacaatagaagcagaagggtcattgccaaactcttcttatgaggtttcaataaccttgatacccaagccacacaaagacacaactaagaaagagaactacagaccaatatccctcatgaacattgatgcaaaaattctcaataaaatactgggaaatccaatccaaggacacatcagagaaatcatccaccatgatcaagtagtcttcatcacagggatgcaaggatggttcaacatacgaaaatccaccaatgtaatccaccatataaacagactgaggaaaaaaaacaaaaacaaaaaacatgatcatctcactagatgccaaaaaagtctttgacaaaatccagcaccccttcgtgataaaggtcttggagagatcaggaataacaggaacatacctcaacataatgaaagcaatatacagcaagccaacagccaacatcaaattaaatggagaggaactcaatgcaattcctctaaaattggggacaagacaaggctgtccactctctccatacctcgtcaatattgtccttgaagttctagctagagcaataagacaacaaaaggagatcaagggaatacaaagcagaaaggaagaagtcaaactctcactatttgcagatgatatgatagtctacataagtgagccagaaaactctatcagggaactcctagagctgataaacaccttcagcaaagtggcaggatacaagattaactcaaaaaaatctgtagccctactatatactgatgacacattggtggagaaagaaatcagagaaacataatcctttaccgttgccacaaatataaaataccttggggtaacactaaccaaaaatgtggaagacctgtacagtaagaattttgagtctctaaagaaagaaattaaagaagataccagaaaatggaaagatctcccatgctcttggataggtaggatcaacatagtaaatatggcaaaagcaatctacaaattcaatgcaatccccatcaaaatcccaacacaattcttcacagaccttgaaagaacaattctcaactttatatggaaaaacaaaagactcaggatagccaaatcaagtctgtagaataaaggaacttctggaggcatcaccatccctgacttcaagctctattacagagctatggtcctgaaaacagcttggtattggcacaaaaacagacaggtataccaatggaatagagttgaaaaccctgatattaacccatacacctacgaacacctgatttttgacaaacaattcaaatttatatgttggaacaaagagaacatcttcaacaaatggtgctggcataactggatgctggcatgtagaaggttgcagatagacccaagcctattgccatgcacaaaacttaagtcaaaatggatcaaagacctcaacataaattcagccacattgaacctattagaagacaaagtgggaaatacccttgaattaattggtacaggagaccgattcctgaacatcacaccagtagcacacactgagatcaacaattgataaatgggaccgcctgaaactgagatgcttctgtaaggcaaaggacacagtcagcaagacaaaatggcagcctccaaactgggaaaagatattcaccatccccacatctgacagagggctgatctctaaaacatacaaagaactcaagaagctagtctccaaaacaccaaacaatccaattaaaaagtggggtacagaactaaatagacaattctcaatagaggaatctaaaatggctgaaaggcacataagaaagtgttcaacatccttagccatcagggaaatgcaaatcaaaacaactctgagataccatcttactcctgtcagaatggccaaaatcaaaaacaataatgacagtttattctggagaggatgtggagaaaggggaacactcctccactgctggtgggaatgccaacttgtacagccactttggaaatcagtatggcgactcctcaagaaaatggaatcagtctaccacaagatccagcaattccactcttaggcatatacccaaaagaagcacattcctacaacaacctgttgtaggaacaatctgttcaaccatgctcatagcagcactatttgtaatagccagaaaccggaagcagcctagatgccattcaacagaagaatagatagaaaaaatgtgttacatttacacaatggagtactacacagcagggggggcgggggggggcaatggaatcttgaaatttgcaggcaaatggatggaactagaagaaaccattctgagcgaggtaacccaatcacaaaaagacaaacatggtatgtactcactcatatgtggattttacacatagagtaaaggattaccagcctacaatccacactgccagagaagctagtaaacaaggagaaccctaagagagacatacatggtcccctggagaaggggaaagggtcaagatcccctgagcaaattgggagcacgagaagaggggggagggagctaggagaatgagaaggggagaagaggagggatgcagaggacatgagggagcagaaaagttgagtcaggcgaagaatagaagataacaagaatggagataccataatagagggagacattttaggtttacagagaaatcaggcactagggaaatgtctggagatctacaaagatgacaccagctaacaatctaagcaacagaggagaggctaccttaaatgccctcccctgataatgagattgatgactgacttatatgccatcctatagccctcatccagcagctggtggaagtagaagcagacacccacaactaatcactgaactgaactggaatccagatgcagagaaggaagagtgaagagcaaagggtccagaccaggctggtgaaacccacagaaacagctgccctgaacatcggggagcttttgctccccagactgatagcagggataccagcatggggctgatccagaccccgggaacgtggacttcagtgaggaaacctcggaattctacgggacctcctgtatttgttcagtacttatccctagcacagatgtcgactttgggtgcctattccacatagagggatactccctgagccaagacacacgggggtgggcctaggccctatcccaaaggatatgatagactctgatgacaccctatggaaggcctcaccatccagggggagcagaaaggatatgtgataggtagggttttagttggggggggtggtaggggaggaggggagggagagggaactgggattgtcatgaaaaacaatcttgtttctaattcaaataaaaaaaatctgcaaaaaaaaaagatgggaaatacacactctggatcacatgtagtgttgtgttgactttgaaatttttgaatgctaatgagcaaaccacagctgctgaggggcattggattgtaaaatgaacggctgaattaaacctgcctagatactttaaggaagccttaactttaaaatggaagtcagaaaatgtttgggaagacattatgctttggtttcctcaagaaacgaaaggccatggattccttcaagattaatagagatcagtttttattgggggagacctcctgaaaattttggatacagacataaagaaataaaccaagaaaaactataagacaggtgatcttataagacactataaaaactataagacagatctctctgcatgggaacagttctgagactgaacaaaaatgttacaactaatttccccaggacgtggccattgtctcagttttcccctggagatgctttcgttcccagaaaacaggacccagtctagagaacacactgcccacattcccaagaggtgtggcagatggttttggtcatttggtgggttgtgaatatttgtaatcatttaggggtgatataggcatatagataaagagataactcttaacctcaaatgttttacattggtatggattttggtatattgttacaaatttatagttatatttgttatactacatgtatgtttctactcttgtttaagctattgtacctatgcaactcattttaaaatgtaacatataattaggaaatacaggttagttgttagtcatctataataatcaaacttgtagtcatgttaggtatgttttcaaggttaaacagatatatcttagatagatagatgatcttcaaatgcttcagagacctacagataatatggcatttaatatgcttaatagtctaaggcttttcatggcagcaagacacatctgctcctggcagcaccaatccacttcataaaaggatatggtgctgaagaaattccatatggagtttgttttaattgtgccaaagctagccatttgggcaagaaactgtcattgccatgactgctgacagtatatgctctgaactggacatgcaggacacaagggaaagcaactgctgagctctgccaagacaaggtgacattcctttaaaattcctgcttcatagaaatgtctgccagacattctaggcctgtaggccaaagatggaagccccaaagttgtagaggaaccttggtgacttcaggcagccagatgtctctgtcatttctataattctggaagtggcttgcactgcactgcacttcctgtttactcaggtaataatatttactcaggtaatatccttctgggggtctttgagggagctgaagactagataattacagttacaattttccttagttgtgacagatggtaaactagttacaaaactctggattaatgatgataggataaataatggggtatggcaaattttcactaaatttgccaaatataaatggactggatattgtaaatgtaattcttacctaattattcttattatatatagttttactatcttaaagttaaaaacctttccttttttatttaaacaaaaatgggtaaacgttgtagaacagagtttaactatgtaaagatttgttgctgtttcatcttgcctgcctaaggcacctgattggtctaataaaaagctgaacagctgccaggcagtggtggtgcacacctttaatcccaacactcaggaggcagaggcaggtggatctctgtgagtttgaagccagcctggtctatagagtgagttccaggacagcaaggactatttcacagagaaaccctgtctcagaaaaaaaaaaatgctgaaggccaataggcagaagagggataggcaggactggtgagcaaggaataaagaggagccagctagccagccagggacagacagacaggcatggaggactcagaaaagcaggctaatacatagatgaagtaaatgagcctcaaagcagcatagattaataatagaaatgggttaattaggcttagctacaaacaagcctaagctaaggttgagcattcataattaaaaataagtctccatgccatgatttggggcctagtagaccaagaaagtctgcaacacatgagcctgtaaacccagtgctattgggggatacaaactggagtttgctaggccttgttggcatagctctaggttcagtaagagaacccgtctgaaaggcataagagacagagggtgagacagcatgagtaagagaggtgaattgctgtggaatcatcctcttgtacactgtaaagatttgtcactccaatttgtttaataaaatactgagtggccagtagttcagtcaggaattataggtaaggcgaccaaactaaggatatgggaaggagaagggtagagtcaggaagcattagccagatgcagagggagcaggggatgctaataaaggtaccacatggcaatgcataaatagatatatgggttaatttcagtgtaagagttagttagtaataagcctgagctattggccaagcatttataattaatataaacttctgtgtggtaatttgggaagtggctgccaggaatttgggaacaggcagttgggatgagaaacatctgtttacagtgactaggggacaatgtaaacacctaacatcttctatgagtttgcacacacacacacacacacacacacacacacacacacacacacacacctttattgaaagacaacttttgaaaaagatctctcaacttagtaactacccaaggtaggcacagagaagcctaagggatctgccacagacacacaacagctctctgatggaattgagttaagagtataattgaagaaggcaggtctgacaaactccaccatgctaggcattcaattataacaaagaattggggaggagtttttgttttggggtgagcaggggttggcaggtgttttgacaatcttggcgtgagggcgaaaactctatagaacagcatagcgttcatatatgtccaaggtccattcattatttttttccctaacagtgacagtacttattcgcttcccagagcctgcatttctagacttttttttcactcaaggcacaggtgtatatagattttaagatcaggtgtctgtgaattccaggggagacagaaaattcggtaatcttctatacttacttcattaccacgaggcaagaacaatccatctcttcctgacagctagctggcagcacagatgggattatgatttggtgcatgcagataccttgagcaccccctatggttctgagcttccagaatgatccatgcgaacttcctatgcctcttctaagagcttgttaatggtgagcatattttaatttctcccaaatgcagcattactgcaatccctatattttttttgtttactccttaacagtactggaggaagagaatgggccataaaaataatacatcccatttgtataacactgtacagtttacacagtgcttccccgtgtactccgtgctacaatgctcactgcgccccagcgagttggaaggtaggaattatgaaccattgtgaggactgaaaaactgaagctccaggaaaggtgtgcccctcaggcctcacagcctgcaagctgactaacgggggcacgccaccagcttccccccttaggcctgtcaacagctggtctttgcagcttgatggagatggatgggaaaggggaaagtaagaccttgtgctcccagtctgtatccgcatggggttttacaatgctgccatctctgcagcatgcagtgctctggctggggagaaagcaactgcccccggcccctgcatggagacactgagtcaatcaacacaaatcaatggagcaagagcaagccagggaagcatggaggtggggaaccagcaagaggggagtgtgtttttctttcctttgtttctcctgagatctgggggtagtttctcagttggttcttcagcagctgtctcggtggacttcggcctaggaggagtctacacaagcacatgttagtcatcttgctagaaccagggaggccactctcatctttacagagccagagtaaggcagagggcagtggtttgcaccaggacatcctcccacacacacagactggaacacgacacacacatagcctgtgcgtatccattcctgaccccctacagcctcaccccttccgctgtaactcagcaacacaaaggagaatggacgcccttctgagtgcagcccatggaaacacaagattgtctactactcaatggggtggtgtcagctagttggaccaggtagggcaggtagaaacccaggagaagaacaggagaccttagtgatggtcaagagcagatggtgaaagcagcatgctgggagagctgggcagggaatggggggggggggctgaagcaaggatgatttgagctcacagcagcctagatgaggcgatggtagacagctgcaaaaccactgtccaccttgctggcccggcctccaagccagagtagaaataggacctcagagccaagggcattgattatccaaatatccatgttaaaagccatgcagcccaggggggaaagtcaggtggcctttagcttcacctgggtagcgctggcagcccccagctgtagagcctcttgtccagcggccattgaagatcaccaagttccacttgtggatctcgtcactgctcagagagtctggggacaggttacatatttccagtcgagagaactgcttcaagaaatccgaaaaggacatcctgaagaacagaggggccagaaaggagggagtgaagtgggctggcttggaagagagattgaaggtccaggaaagcgcgctggtcttccagcagctgtggaccagccagggtcccttctactgggctgtgacacaaacgagcagagctaccttcgaaatctgtcactgtggtcagcatctctgttcctaaagaatctccctcttgtatctgccagccacacagagctggaaccatgaaccaaagggattcccccctccccggaggggatgccagtgcagccctggcctctaggctggatcacaagtaagcccatcagaggctcgttctgaagaattctccgtgatatccagtgtagagatgtcctctaagacattgtgtcttccacagaaccgcctcccaacccagacaaaggaaagaatcctgtttggactgccagctgggcctaagcattgggtgagggtggggagtattgctttaggctcacagcagacagaaaagctgctggccaggccatgttgtggccacagagagctggggttcaacgctttagacatgagaattgagaaagaattatactcggacaaggggtcagagaaaatcaaaagcccccatgttaggaacctcatcacatccctggaagtcctggagactggtcctcccgagtaccttggaacagatggaccactgaggggacagccctctggcatgcagccgctcaccagaactctccatcctctgctctcttgtccagctcctccttcttcctgggatctatgtgattccactcaggtgcactgtggagggggaaaatgagccggaggtggtcatcactgagatgcaagctgtgtactgcagctagatgcccacaaaggaccacaaacaggacgcatgcccatcaacgaaaaaagacaggcttggatctggtatgaagtagtggaccactggaagaagccggggacatgggcttctgcaggggggcagggggctgggcatgcagcagaaatgcaatggctttattctaattttcactctctgggtaaattccacattccaattaagactcacagacctctgaccacaggaacaaggaggcactgtcacaagaaaggcagatactcctgtatccattagtaacttgtcactctcatcttctatcagacctgggcggatttatttataagagggcccagcgagctccggggacagacactgtccagttcctaagtctacagctttgatcatcagggcctagtttttatggaaatttccttgaagtcatgccatcccgtgtcctgctggtggcttttctgtggccatatccatgtactttgttcaaatgccgtccacagctgcctgacctttacagctttgtgttttcctgaaatgtgtgtgcagtatctacataagtgagcaatgttagtatcaatcctaaaaacagacaaaggctctcccctgagcacactccgcaaaagccccgctcctccctccccagccaagaagacagccgggcccaacctctccctccagctggcttctaagcacttggagagcatcagaggcattctgaggcttcttaaagtcatcaaaacactcatttagtcagtactgagtcccacagaatgtgacaagcaaaagttaggggatctgattgagaattctagacctaatctaatctcccagttggtttgattttcattgttgttactgttgacgtttcaaacttaacagctaaggcaggtggatgctaactgagtcagacatgtcgcctcagagcttccatgtcctccctctccgactgccagcatggaaatagcccagactgcgtctctggctggtagaggatgtctgaggcacggatgccagagtacagccactccaggccctcatttccttgagccaacctcccttaccagtagataggtagcccaaagattgtccttccacccagtaatcatgctcatctagtcaggaactcatggagtgagtgacattcccattcatccccgcctaggtgggccatggctcccaggatcaaggtttccccaatacctttgttctttcttggtactgaggggaacggtgtttgtggcagggaaatgtcagattgtgagtgattgatttttatcttgtagtgtggtaggtaggaaacgggtaagtcttcaatactaggcaaaaatccatggagctgccaaatttccaagtgccaaagcagaaatccagaatcaaaaactgcagcaaagtggtttctatttggcttttcccaccctggaaccatggaatactatttccatagcacacgctatgcaataaacggacacagggtctcattgtttatggtgtgtattacatgacaccttcatgcagggagaggtgagcattgggaaagagagagaaacctacgcatcactccaggctcccgaccattccacttcaccccacgggttcctcagtctgatcagcttctctgggtggccacagaaatccacctgcaagagccacacatgggcaaatcactgctgctacctggagctcatgtctgcacccagggcatgcaatgtttcaaatgtctccaaaagaccacactttccttttcctgttattcttgtttgtaagcttcggtcaaatgttttattttcacaagctattagaaacaaacaaagagtgaatctaccacaaagccaactatatatctacttaaacttaggtttagattttgcagctgattaacccagactgtgttctgatgctgtttggagacagcatcctactacgtgcccccctaaacaatgccaatagtgtggaagttaatatttattggttacttactaatgggataggcacagtgctaagcacttcaaacacacaattgcttcatttaaacttcacagtttgacctcagcaatatgagactcagagaactgaagattacctagttagctgtatagctatcccctcctcaaggaaacacattagacttggcaagtaaaggaaacttgggggcccaggaagttcctaaaacttacaggactcacaaagcccctccccaaggttataaaagcaatgaacatttgcagggcaaacattgagtcttcatcaggtgctgcctgcaagtcatgcaaggagccccagggatgcagttttcatgggtcatcacccatgctggctttctggtgacgtggctgcatacatgagtcatccctgctcctgtaagcaatcccaatacaagccctggttcctcgaggtggatctgggcagaactgtttctttgatctgccttatctgaggtgagtacaggcttgctcacatctctccaggaaaagaggagaagcctagcagagtgtctccaaagcctaaatggataaatgccctcgggaacttgtaaaatttgatcactgctgctgtggggttttcaggtggagctttcaagagatcaaaatctgagatagggattaatgtgttcccaatgagcctgaattcatctggtgtgagttctcattctctcagaattgaattggctgctaaaggtcttataaagcaaattccctcttatttgtttctcttctgaatctgcccacttatctttccaattgatgctgttatgaagccacatgaagttacccagtgttagatttcccagcttccagatgcataagataaaaacaaacaaacctctttcttttataaatcatccagattccagtattgtgttatagtaacagaaaagggctaagatactacctcatgctactatttaatgggcactcaagtatggtccccatgcacccctgcacacatgctcacacacatacacataagcaggccagtctattaggtctttatcatcatcatttccatcatatgccagcccaaagtttctgtacatgttcaattcatgttaattgggttgacttgatttaacaatatcacattcaataaaaatatgtgaagtgactagtgtcaacatcgcaataagcatccagagctggagtacttagtgtgtggctttttctgcacggccactgggaaacccagaaaattcatttctcagttgtagcactgtctaggttaatgtactttacgtttgtcttatcatccacttatatctatgcttttaactataaaccaaattaattcaaattcaaatcctatttggatgtaggtagaacatatgaagtaaaaatcatgactattacaggctgtgctgggggcagagaatgaagactgtctctgtgccttctcgtggttaaatgacatcttaaacactggagtagaaaccgtttcttcttctaggggctcccatgggttttactgctttgcctacatgaacatttgtttagaatgtgtgtagaatctaactgacggtccctgtaacttttatgaccacacctcagaaaaaaagttatatttaattgaaaccagagacatagagtgagggtggctgagacactgtctgtcccctgagaagctaagagtttagagcaccctgtagtgagcatcagtcaacaacacatctgtctggggctctgcatcccgagagaaacttgccctgaataagcacaaaagttcaaaggcaactcaaaacttctcactgtgatcttctttctcaggacaccccagatattatatcaaccccttcctacctcctccactccggtaacagagtatgcgtgacctttaaccagcttttgcctggtggtggcttctgcttcggctgcacttgagacctggtcaaggagagagtccaattagggaggctgaccctgacctctttggagccagtacgacaatgttttctaaaagtacaccatacagccatggctctcccaggtgggaagagtgcagaggcaagaaccacccacagagagacccatctctagacactccctttaataagccagacaggtagtgagtggctgcctagctgagcctagagtatgactgagagtgtagctatgctgcctcagaacaaagcaagcaaacaaatgaagctgcccattgtgacatccagagaggaaaagagagcttctaggtagatagataacagccagccctcaggctggtagcttccagatctgatctctaaggccacatagacattccatacagcaaatcttcctgtcagggctggaccttcctttttccttcagggatctccaagtccatcaaatgttgtcagctgacaatttgttttcccacagactaagatgatttagcaaagagatgacaagtaggtaggaaccaggatccaggcgacgaggctgtactctcatgaggagtttagccgaaataaagtggttccagcagttaccagcaaaacataaccttcaaatgtgactaacacaagctcccacccactcatcgtgtcttcgccagttcctgaacgctgtaaactaacatgccaccagggaaaagagacaaagagaagactagaggctcacatcaatggaacaacccaacagagagcctgaacggagggccttcctgatgatgtggtacagagtgcctgggggcttcctcaagtcataaaactcagagatgccacctgtgaaatcttcaaaaccctcgattgtggagcctccagcaagagcctcataggaaccattgagcctgttgaaaaaagaaagaaaataagcaacatccacagccatgaacaacccaataagggaaccacgggacatagaaaagagcaatgacaggacataggctagagggcatggaaagaccacgtgttttagacagacatcccaggaatccactcagaacagatgctctggcagcccctctccaggcctcccacgacctttcaaaaccaaaacccttctagaattggctctgactgcttgggtttctgggttgtcctgacgcagcgatgaatggggagctttcccttgaggctgggagagattctgctaaggattgccctaacagaacgagaaagttactggggtatcagagtgacagcaaacaagaccaattcaaagaagcctttcaactttgaatgtcaatcaggaaaatggcactcaagaaatgagcagaaacttggttgaatttggtcgctaaaaacatttcttttcttcttcctcgtcatcaacatcattttaaacattcactctgcccaaaatcttaccttggggtctgagagaggaaatggctagagagacattcttgtgggacagagctagggccacatatataaaatgtgtttgtgtttgtggtatattgaggattgagccagggtcgtatgcatgctggtcaacctctgtatcactgggctacatctccagctctagagaagagatcttaaatccccagcccaaatttccatgtctcttcagaggggcgatttctgtctagcctatggatgtctggatgctgggaaaaccttggccatctcaccctgaatggaggggcaagtgagaaccttcagggaggccccagcgtcttccggttcctcaccatctcacttacttggcataggctttctccagcagagcgctccagaattcgctgccttcttccgagtgcagaaagaccagctgtccattcttggtgggaagcctgtcatcaatgaccacgtccacccactctccatactgccagaactgggggtgggaaaacacgacatggaccacatgcagaagcagagaggggcccttcagtggcctccttgatgggggtctctgctgtcagtgagctggtcgccaggcttgtgaaccttaagtgccctgagaggtttacatctcatccacacacaggagatgctgatcacccagagagccaaagtgagtgactcagactcacatctcctggtccttagtccagagtgagtccctcatggccccatggcctggaggaagaaggaatgaggatgacttgatagatgtataaaagaatggttctcaaactggagtgtgtacccaaatcacccagagagagaatctaatctccgtattggcctcacttcagagttcctgattccacacatctggagtaataactaagataaaaattggtgcaaaggtcacaagcaaagcctaatacctggaaatgaaaaatgcctgcatagttcttctggaagctctggtccttgggcaccactcgataaagcagcttttcattcaaggtgagagaggcaatggctgccagaagccaacagtcgcctgcaaggaatcagaggagacaacggctggtcaggccaggccttcactgtcccagccactccagagttcatgtttgttgtagattgacttcagctatagaacaattcctgagtgtgggttatgtgtaaacaacagaaatgtatttacccaagttcaagaagccaacagacttggtactggtgagagccactctctgtttctacttctctgcttgatgttgtgtttggcctgacagaaaagtgaacgggctaaagggcctggctaattctcccactccattagaggagcaccgatgcctagggccctcctcttagtatgatcacactgggccggggcctggcactgggtcttggaaggacacagtcaaccaaggagcacaaggccactctcctctcatggctgaaacgcacacacattcagctcctgaggtgaaacagatgcactcggatgggagaaacacggaagctattccggagcgcataaggtatgagagtcagggagtgagtgagtgaatgaatgaatgaatgaatgaatgtgtgactgagtgactgactgtgtgagtgactgactgagtgactgagtgactgagtgactgagtgactgagtgactgactgactgactgactgactgactggctggctggctggctggctggctggctggctggctggctggctggctggctggctgatgaatcctttcccacgatggccttaggtaatgacagttgactctgtatgatctgtgtagagtataatggtccttttatattccagagttcaccatgagagccttggctacaatacccttgagatattgattagcatgaaatcatcataatttgaagcagaagaaatggaagtcaagagagcttgaacatcccagggcttggtgttggtcactttgaaggtctgagtatatttagaaacaggtataaaactcccttctgtgtgagacagacatcccagcccccgaaatccacctcccaagacagcatcactgactcccagtgacaactccaaatgatgagtcataggccccagacactacatgctcaccttaacctgctgagtgggaaggacaagcatcccggaatctgtatcattttgctcacagctgtgtagatgtttgtggtactgcagagtctgagggcaaaatgtcctcagtgtccctcacattgtataaaacaatataccaccatactgcccaatcctgcctctgtccggcttctctgcagatcacttgccctaggagtctggggtttagtgaaacagtgcttgtttctcttattcatctgggtcttccagctctgacacctccttgtgtgctccaggcatcactgttcccatgtgaaacattagaccctcccaacctcagccagaaagcctttttctgcaggaggtaccagcgcagactcagctggtcaggtgctgacactaagagactgttaaatgttcagtcctaactgggatatatatgtcactccttcccccagcaaggctcagaaaacgctgtggaagacagagcaggaagaatatacaaggcagaaggtgggaggagggctgtggatcgccgtctcctagacacggcatggcgattgcgttcacgaagtcacagcactctgctcctgcacaagacctgggcaaagtcaagtcaacgaggtcagtcaacaaatcaacgcacagcgctagttagacccagggagtatatttgttaaacggggagggaggaagggaggaagggaaggagggaggaaggagaaggttcagctgttaagagaactctctgttcttacaggggacccaggtttggttcacagcacccacatggtggctcacaacactccttaactccagttccagggattctatgtcctcttctgatctctgcaggcagcacacacacacacacacacacacacagaggcatgcatgcactcactttttgaaggatttttctgatttttgaagtaagtaacctgatctttaccaacaaacgctatccctcagattgattacagggatccaaggagaagttcaagttgagcatggagacggcgcctgtatgaatgcattgggttacattgctccatgctacagaaaacttgaacaggggtaaaacttgtttaataaacaacttctcaagaatggaaacagatatcctcctccccacctggttcccctcagctcagtttcttcctatgaactcatggtatgatgtcatgtctctgcctttctttgcttagaaacaaaatgcaaaccttccctgggggtaactccaccctacctgcctggtctctctcccattgtgagtttagttcccagtcaaacatacaaagcgcagagtgaaccctcactgtttctcctgcctttcattccttatttgttctgtctgtctgtctgtacagttcttcctgcaacctgaccacttgggtcttcaccctgtctgtaaagcccgtcttaaggtttgctcagaccacgccttgtttgttcttatgttctggagacctcctttatccccctcagctgatcagtcagcaggaaagatggattcctaagtccactcacacggaggcgccataatggcacgttccttgccatccccaaacccccaagccttccctccctccacagggctcctagatactgccaagaccaccttatacacctgtctgtcatccctgttcctctctgatctcttcctgccaagcgggaacatggagtctctcctggtaatgtctctggcagtagctgacaaatagagaagacccagtaaatttttgacaattaaaacatgtcagcaaatgaccaaaggaattcatgaatcatgtctgtccctttgtgagtcaacaatagcacccacacatgttgacacctggcaatcccaggtctgggatgaagaaaacagggccatgcattgaacctcacagatctcacagataacacctgctctgcacccagctgcttggctactcaaaactctgtggcagaagaagatggcgggtgagatgggcacagtccctggggacagaatgaatgctctgtggtgtctctgaagcaggtggcttctcaagggaccctgagaggctcccttctgctgtgaagatgcgcactcccaatctaagctgctccaacaccccaccccaagcacttcctagacattccaataaagcatgccatgaaacgtcccttggtggccaacatctaacaggtctgcccagccaagaaagaccttaatgttttctttctcttcctcaatcctgacatttcacagggtccacccagctgcttctgtaaacacaaagaaatgccataggtatagacatttgggtccctgccaatcactacataaaatgtgagtggacccttccacaggatgctttttctaaagtgcccaaatggatgtgcttccttccaaaggtactcttggaatggcagactctcctgctaaaaaaacaaagaaagaaagaaagaaagaaacacacacacacacacagagagagagagagagagagagagagagagagagagagacattagacacttgtttgaggggcctaccttgatctaagagcacagttttggtttacaaaagcagtcatgaagccttaggatctgtttgttgacagatgaagtagacaagaaagcctggaaatgtctccacagacaaatgccttctctccagccacctcccagctcgtggtcaccacgggttagcattcccaagaacttaagtaggaatttggtaaaaacaccttctttcctgatggagtgtggcaaatttgctaccagaatctttctgcccactgttcctcccctattgtcttacctaggaggtctgctttatgcctggagatctagagacatctcataaacccagggctacagcgtgggatgaaagccaacacacttgagagaacagagcaaaagccctgtgtgtgggggggggtctcagaactagcccagggctacccacttctagactcctgtcacaaaagagatattagccccttaacaccacttgttcaaaccactatggttaggttcaacaatccttgcagccaacattttcctgatataataacaaagtgattagtataccttgaaaactggttctgaaagaactccactaaaggagttatttaaactatcaggaatagttgaaatatgcacattgttctataccctggctgggctggctgggttctgaggatcctggctgagatgtctgtctgatctcaacaaaggatcctggagtatgggattacagagagcaacatttgcatatggacttcaatccacagaaacagggaccaggagcatactgaggagacccaggccctcccccaaccccaacaagcatagatatgctttggaagacagaaagggtgcttctgtgggggactgtgatggtcacttttaattgtcaatgtgacagtctagaatcacctagcaagaggcagtgagggactgtctagattgtctgtgggcatgcccccccccgtgtgtgtgtgtgtgtgtgtgtgtgtgtgtgtgtgtgtgtgtgtgtgtgtagggagggtttcttgattatcatatcgatgtaggatggtccagcctaagagtggatggcaccatttcctgcctgcaacctatactgcacgagagtggagaacacagaggtggaaaccatacattctctctcagctcttgacggtgggcataaccagcggcttcaggttcctgtcctgacttctcacaatgaaggacgggaacctggaatcgtagccaaatagacctttcttccttaacaatgcccttgtgggtatattttaccactacaacagaaaatgagactaagacaaaaacctaggcatctatgtccatttttttccttactgtaacaaaatacctgaccctggggattgctaaagggaaggggctacagttagctcattgttccggaagtgtgggaaacctaagagcgtgacaccagcaaatatctcgtgctgcttcatggctgcaagcagacaggcaagttagagcacgcagaggagaggaaaggccgttgtcctgtgatggctaactcaatctccagaaaaaggtaccagtcctctaaataacctcatcactcgagcccccccccccaagctagcagcaagagtctcggtggggactgactatccaaagcacagcagctggaaagaactgttctgagtccagatgatgtggggaaggaggcagacaaaaacgcagagatggagatacatacagggagacaaaaaaggagaaatgtaagcaggacaccatgcatattgccaaggaaaggagggcaataaaagaagaattggccagaggagtgtggggttcccctggcctagctgagcaggactaacagacaagactgagctgaagttcctatcctctgtttatccagtgtggagaatgaatgagctagaaggtctcttgtgagtggcaggcggagcgctggacattaatagacactagagggcgcactggagacagcctttcccactggagcccagcggcaaaggctttggtaagagagtgtatctgaagagtgggaaccacagaggggcaggcatatgtgcgaacaccagggcgagtatatccatgagggaagccagagggtcctaagaacctcgttctcatcactgattaggaagaactttgtctttaagataaacttctccgggctagagaggtggctggggcggggagcgggggttagagcattcactgctcttccagaggacccgggttcagttcctagcacccaccgagtgcctccaaatcacctacaactctagcaccagtggatccaatgccctcgtttggcctcagcaggctcctgctcccgtgtgttgcacataaacccatgcaagcacatacacatcaaaataattttttaaagataaagttctcacattcaaaatgggttgtccacccaggcgtgacactcctcacaggaaacttactggagatcaagagtcaacagagaggaataccggttggtgacgcctttgggtttcatgaagaaatgagtcggaataggaaatcccactcaggtctgacggtgcttctgtgaaggggccagggcgaaagagattcctagagcctttccaggtgactttagcacagggatatgattcccttcgtgggatttcaacctacgatggaggtataacttctgtttctgcccttcactagctgtgtgggcccagaaagagacggcacctccccgagcctcggctcatcatccacacactagaagtattactaatccccactgggatgggaactgagcgataaagtgggatctgtaagagataaaacacagtatgtagccactaaattatagctcattaaattacagttcctcgtgggaaagaaaaggctagaagcagctgctaaggcaagggcaagagtcatccaggcagccaaagggagagggcgtggggtggacaggttagcagcggggcagatattgcacatgaatttgagaggataaagactgaaaattgacgggtgaatttagcaatgcggagatcattggtgatagtgtcagagacattcactgttctatacttgctctatgtatccagctgctcagggagttgagactgaaggatggctggagactagcttagacaatatagcaagagcctacctcaaaatacaagcaaaatcaccgggcattggtggcgcacgcctttaatcccagcactcgggaggcagaggcaggcggatctctgtgagttcgagaccagcctggtctacaagagctagttccaggacagcctccaaagccacagagaaaccctgtctcgaaaaaaaaatacaaacaaaaccaaatgatacaggaacaaataaacaaataaattaaagcctgcatgtgtcaataaccgttgttattatgagatataggtagcaagaactcaagcttcagggaatgtctcaaacattaggtagagtggggatgctcctagactgtaagtagatggggggggagcaggtaaacacgggaacctagtaggagggattcccctaaccttgggaagtgcaatctcagatgcttccaagaggaagctcacacagacagttcctatggcctactgccaactcagaaatcagaggcagagaatccaggagaagatgctatcatggtgcctgagtcagggggaaaagaagggcgggtccctccccttgcagaggctgtggggtcaggcacagatgaagaagcaatgctgcctgcgggtagagctcatgggcacacatatggagctgagacaggtctgttgggtcctgatgaaccaggaaaggagaccatacaatctatcatcaccccgtcaagaggtcagcaaggacccggaggacagtacctggctgtataaaaaccatctggtctatctccattaccaggtcattttggcctttgttggagccagctaccatcttgagaagcaacaattttaagaagtgatgtgccgcttatcttagtccacttgtgatgctaaaataaaatacgacctaccaagtggtcctcaccttcctaatgctgtgaccctttgatacggttgctcaggttgtggtgacccccaaccagaaaattatttccgttgctactttatagctgtaatttttcgattgttttgaattgtattttaaatatctgataggtaggatatctgatatgtgacccctgagagagggtcactcgcccctccaagggggtcacgagccacaggttgagaaccagtatgctaggcagtttatgaacagcactgatctatctctcccagtcctgcaagctggaaggcacacttggtatctcctcctggttcataaatgagggatttcttcccatatcccagcatgatgggaggaaaaaaagagctcaccaggggctctcataagggcactaatcccattcataagggccccatcctcaagacttaatcacctccttacatcctcacctcctaacactaccacatcaaatgttgaaatttaacatgaatgtcaaagggacaaagagaccattcacccatcccatagctctcacatagaataactgcaggagggagatgtgttccaaagagacaagaacctaaaacgggaagagtcatgatacccttggccagcttctacgtccctccctcccactcactgtcactagaaatgggacaccctagcaagccaaaaatagttgagaaaaacagtctctctgattacacattcaattgcaatgcaaagattttgaccccactaacaaacgcttgttttttttttttccttaattcatcttcaatattttatcccagctgaggcaccctttgcccgctcttccttcaaaagactgctcgaaatgtttttacacacaggccaccaattcagctctgtacttcactgctcagcaatcacgaagcatccttccgccctcctgttggcaagcatgcctcttcaaaccggtagcattcgctcatgccattttgcctgctttaaaacacagacattcttttggctgctcttggttttgttgacaatttctgtctctctgccaagactggaagccccctggaggtagctggtgggcttcatgttcctcccagaccccagcatgcaatgtgtgccatcacttctgtcaaaagtgaattgactgtgcatgccctgaccatctaggaggtcctacagtttagttcattttgccaaagtgttctctggcagagaaacatggagtggcatgtgtcaatactgtgtgagacaagaaccaggcttaaatcagagctgctcgcttggtgagtaaagctcttacaagagaagcgtaatgagctagagtagagttctcagccacagcatggttgacattatggaatggattttcttaaggtggaagccatcttgagtgttgagcagtggacctgacttgtagcgtatggatgccaaacgcagtgtccaccattgtgacaaccaaaaaatgacacagatgttgccaaatgtcctctaggtgaaatgagggggaatcaaacacacacacacacacagacagacagacagacgggggggggagagagagagagagagagagagagagagagagagagagcgagctcaaagtctgaggaaagcttccccatactggcaagaggatagacagaatgacttcctccacagttctgtacaatttcttaatattataaatgtcactagtggtaactctcaagacatatctctgcctgacaccattagagttttccaagacacactttcccttgcttttcctcatgcctgctttctctggttaaagaattttttatcagttaaaggaagcctctgccctgttcctccctctggacccataccaacagtgtgttcttctcacccagctttcaacagccatttctctgaaaactcttaggacatggtggtcgctcaggtccacctggatttgaatggctggcctcttggcctctagtagacccttcaagccacacaagtacatcattctttgctctcttcaaacaacagagattccatctttcacttctgtgaacagtgacaagcttgacttttcagaacccacccaacctgtaggcccggactgtcctctgaggtcacccttcacctttgccctcttctcaggccagcctggtaacacctggctccagctcagctctggcctttggcatcttcatgacacctgttaactctgagattattgtcccttgctccccaagacacatgaccacctggtagccacatttgtacaggtaggccagaagcagtcactgaactcctgtgagactcggagtcttcctctgtaaaatgagtctgtgacagtttgtcatacagggccaattgatactgagatgtatgtgtgtgtgaatatataataaaattataaaaaatatataaatgacatgttctttttgggtataaagtacatataattttcatatctgcaaaagtacagtttgtgaaatttatattaaaatcatatattacatataatgtcatatatattgtttctcaagtgccacagactacatagattgtagggttccaaaaaattgtaatggcattgaaaaattcccctcacctagtaacactgaagccactgtagcctgttgcaacccactacacctgtttgtggaggccaccagttctatgaaaggctagcaggtataagtaatacacagaacgtggtacttgataacaataaatgactatattatagcttgtgtatttactacactgtaatttttaatcattagtgtgaactcctacttgtagaatttattgtaaactttatcccatgttatccagcagcagtttcacaatctgcattgaccacatttcctgacgacatcacaggattacaggcagcattttgttcgtaagtacacaatactggcatgtcagctggtgtctcaaactctgcctctatcgttaggtggtgtgtgactgtatgtctctggttggatagagaggacatctatgtagacaacacagaacacggacagcagtcacgtgaaccaggaagcatggcatttgtagagcccaggtaaataccttgattagccttctcctatgggtgagcgagcatctttctctctgaccccatccaccaacacaactccagagaagcaagaataattaggagaatagtgaggtgtggtcttcaaattcccagagcagggacaaggcagctgggtgctctgaagtgtgcaggggaccaagggcccttttgcttccactccagctgactcacagagaaagccaacatggacagcgtgagtcgtgcatggactcgggcagctccctgggttagaaaaagaatgagctacaactagacagagattcccagctggctctccagaagccccttcagcttccctgtgcccttaaaagaaaaggatcaggagaccactactccatgccagcaaggagcacagcagaaggtccctgagggcaccaggccatgcacacatcagcagcccattccccccacactcagcgccatcttgagagagaagggcagagaggcactcgcccctctgctacactggaactacagtttcagttattgaattggacagaattgtaagccagattggagtacatttagtttcccagttccctggccagggctcttgagggagatcaaagtggtttgagatattagatatgtcctcgtgaccaatccaggggactagcagagttcactggggagacaactggaaatgcacttaggcaaccttagtcacatcccccccccagtcagcaactgcctctctgctcaaaacggaaaatgttttggcctcactctatccaggtcagacagtgtcttccatacctcctgaaatcatggaggtggcaagaaaggtgtctgccagagtcttggggtctctttactttccccaaagggacaatatggagacaaagatacgttcctatgagcccctcactggggctctgctctaagtgggtcaccctgtcaccacccacctgctgagtcagcttcaaaacaccctttccctgcgcatcctgtcagcctgcaaacgtccttagaattaacagaccttacacacctgaaagtctcccacatgccataaatcctgccaaagttcattttgaatgggggaaccaacccaaaggttccccaacaagttcttgcaaaataaagacgaggaaaactcattctaggctcagcccttcaccctccagcagcttccccactcatggatgccatgtcctcattgctagagtgcacaaggctggaacactgctttcctgtcctgggcatctgcactctttgaacaggtagatttcaaatttgatacccactcacaaatgagtgaaattgaggtcctggccagtcaagtgatctgcacggtcagacactcagtgtccagccaggcgatgagcatggtgcctctcccgtacccttagggccagaagctgcaggcagcatcatcagcaccatttgaaacaggtgcctgcacctctgcacaaaggatcagcccctccactccgcctcccacagcagcttctcagcctctcctcaactccgctttccattcgcttccagaacacgccctctcccaccttcactaacactgagctcaccctgccacctacctcctataatagcatctgcttacctggcagagacacgaaaagagtcagtacctctcagagctattaagaaggtaaggatgaggtaagaggtggaaggcatctagcttatgactgacacccagaaagccctcggtaagcctcccattattctctattatcacccaacaattaacccaaacatgggcgtcccccaaaaagtgaatcagcagacatttatgtcctgtccactacctagaagtaaacaaaactgataacgacagtaggaagatgctgtcgtctccctgagtcacccgaggttgactaggaagcaaagctgtagactgactcccatccacccgtgcttgtccctgcttagtctcctccctctgacaaacattgccaccagtggtgccaccattcccagcctgggagccatgacttcctctccctcaccttccccgcatccagtcattcccaagtgcttttgattttgtcccaaatgcctctagaagcccgactccccaaccatctcctccatgctgcaactcgaagggaccctttttttaaatagtcaggatttaggagctataattacgaaattacaaaaattatcagaacacaaaaataaagtcaaacgcccatttaacactagtaccaaccaagccagcacaccttcaaatacaaggtcaaggggtagcaaagtgaccggtatggtttgaacattagagtccccttcaaaattcacatggaatttatccctcattgtagcttattcacaggaagcgaattttgagaggtcagccctcacaaatagggttagctacccaagagttgacaggattgccatattttccccttctgcccaatgtcatgtagggacacagtgtgccttccaagagtacacagcaacacaacaccatcctgggggtggacacatgcatttctgtgactcatgaatcacccgtctgtggggttttgttccagtcgcacagatagattaagatggtgattctgaatgacttgctacatattcagaacaagtaaagctgatgaagtgactgtgccattgtcacagaactgagttctagctgaggaagagaaacctcggcagctgcagacaggatggatatctttgggtacctttaaggagagtagtttgggtgctaaggggtgataggagagctgggaagaactcagagtctcgggcactttcaagatcttgctttgacagtccagatgagactccaagggcactgtgcccttgtcttgtgtggcaattatttcctaagtatgttgagccatgagaaaatgtttcagaatctctcatatcattttgataaatggtgttctaatcacatctttttaaagaaactgtttgctatgaaatgagagcttccgggttacgctatggttccgtccacgcctgtggttatctgaagacagcagggtttgtcctcttgcagctgtgtcctgccttgggtccccattctccacactccacgtctggccacacacacttctgcttacaatccccgtggttccccattatccataggaataacatccagaactcttcaaattcacacagcgtcagggctgcagcatctggccactgtgcagcctctgagggccttcctccattttccctatcccacctcatccttgaagatccccctaaccacctgctcttctacgtgaaagagctttgttcagatttctgctgcagggagcccttgccccacacccacccaggccagaggaggagaggcagggcctatttcctagcatgagaaagaaacttactacccattcaaatgaatgaaggaaccaggaatgctcttcctgactctgacaagcttgttgggtaacccacatggtccctccccctttgaagcctggacccaacaccatcaaccagcccctgcagccacaactgcaagcgtggctttctggggtaccatccagaccccatggccacatgacagcaagatgtcactgatctacaagtgagacaagcatcagtcctgtgtggtccatgtccagaagtcctcaagggccccaggccacgttctccatgggagatggatcactgtggtcaccctaggaggagagctgctttcaaaaatcagccctgagtcctcctggtggtttttttgtttttttgttttttttctgagtggtgacagtgtactcccttatagcaactataatttttatgttctcaaaaataactctttccagatgcactagatataataataacacacgctaaacaatgcacttctgctgccccacaggtcgcctctcgcctccactcctggttcccatggtgactcaggaaagctccccagacctgacggcagatgcagatccacagtactgcagggcagctctaacaatactggcatttgcccaaggacagttctgagcctggggtctctgcttccaggagctgtagagcagcccagacttaatgtagtcacacacaaaaaaggaaaaaaacagaaaaggccatgtgtgaatgcaagtacgtcatactttatcttctaacttatcagtgagtaggaaaggagagagacagagagacacacacagagagagacagagagtgagagagacagggagacacacagaggtagagacagacagagaggggggcggggagaatatacttcacagccaagggaacttcctaggattactccagagcactttggagttgtataggaaaccccgcagaccaaccctcatctaatttgaactattgttgaagaaattagactctttggtatgaaactgttcagggagttcctatgccccctaccaccacttaaatcagacctttatgctattgagagagaaagaatttcttagtagattataaaaatgaaactgattcaccagggcagggacattattaggtaaatacgttcaatggggtttatgtaaatacattacaaagtgcctagcttgcttattgtgcttaactagaatgccctttgaaataaaaaaaaaaaaaaacaacacagcaaactgctttaaggaaggtgtaacgaggaaatacttaatgctagagaggggtgctaagattcagtgagtagcaccagccacagttagggctccttccaaagctggctgaaaagtggggctgctgggaagccaggggagggctgggaagcttccctgggggccttaaagtatatcacatgtgaaacatagtagtagcagtctccctactactatggaaagtaaggatggctgcaagaaactccaaggtcaaagtgcaagaaggtgtacagatcaaaaacaaggcatttataggctgggtaaatatcctgaacacagttcataagggcagaaggaatacaaggagaggggaagaaagttgagccctgaacagggagacaggggaccctgcagaggaagcgttgtcacccaaaagccactaaacacttgctctacaaactcattttacaagtgttcactgagcagctactctggaccaagaatgactcctggccctaagaatcaaagaggtttgtgagaagcatattctaccacttgacagggaagccctgaccagcttctgggaactataagggatagcacagccagagatcaccagggacatcagagatggcagtcagcaggtgacaggaaggggccaggcaagaggaagaatccaaaaaagaccgatgccttgaatggctcgtggaatagtgtctacttctgtgtgtcagactgtggaaggatacaactgcgttatatcccctgtgaacaggaggcatgagctcactgcagcaggaccaggctcttgaggatcctgcttctggtgcttgcatagtgggaattggcttctcagggactgcagtgcacatctctgagtgacagtcccagatgtaatcgctggggcctccagttaagccccagagttccctgcatgtgaaggacctgtgcatggcctgaggcttcacccttgctgccctgcccccagcctgcatccaccttttcctgttcagtggcatccccggagcctgtgcacacacagggctcaccggtttctaaggactgggatgttgaattgccagtactcagccctcagtagtccagagcctcctgcaactatgtcctctaaccaggcatgtgtcttggcctggtgtctgaggtggggttcctgagtcaccaggaagagcacagaagcccaaccaccagggcttgtcatggatgaaaaactcttctctgggtctccaagtgaccccttcgaaatgcaagccacagatgggaagcaggaagccatgctgccagtgtcccacaaacagtgggaactgtggaatgtattgatggggaatgcactgtgtatgattatcttattgattgttaaataaagtactgtttggccaatggcagcaagttagacaagactagaagtaaaagaggattctgggaaatgtagtagataagtggttatccaggcaggaagtgacatagcaaggagactcatatctaagcgaggaaacaggaagtgtccccttttctcctccgtgccccctccagcggcaaggagggacaccaataaggtgtccgataagataagtcttataaaatatatagatgtatgataattaagactgagtaacagatgagaatcctagtcattggccaagcagcattgtacctaatatgtctctgtattattttgtccatccacgtggtgggcagaactcgtccggctggcggggaccgcccacatggctatagggctcgggcagcttttggcagaaagatttatcataacatgcatcaaaacatcgcagatggatattagacagagctcctacgtaggagtcgaccacactgtggtttatggcttgcacatccaaactcaggctggtcagccaagacagcctagagagaagtctgttacctaggcccacagaccacctccccatgaggtgaagagagtgtctccctggagactctgaagctcacctgcaccttttacagtcgagaactactctatatgagaacataaaccagaatacacacactcacacacacgcacacacacactcacacacacacactcacacactcacacacacacacactcacacacacactcacacacacacacacacacacacacacacactcacacacacacacacacacacacacacacacacgcacacacacacacacacacacacacacacacagccctcaagctgatgaactttcacctggagaagtgaactggtatatagtaggtgacctatatagtaggtatatagtaggtatatagtaggaccccagtcctggaccttgcctgtgacatggtcccaatggcagctcagggaagccataagtttggtctcagagcagtgactctaaatgcatagaataaaaggtagtggtggaaaagtccaatcctattgaaaattatccaaaacactgaaattacaatgtttgtgcttcatgccttaaaagacgtgggcaagtgcataagaaatgcaatagagaaaaaatattgggcagagtgatactttctatagctccaacaattgttctgtgatatgaaaataacacgtgtctggggttgccagccctggttttcagctccttcagtcctccagggaggaaagaggtaagcaggggtgaacggaactaagcgtggaacctagaagtctcccatgctcttgaataatggccaacacgaatatctttcagtaactcgccatgtcacagtcatatcaaatgttaatccttgttcccatcaccttacttccaagtggaaaggtgggaggtcacagtggaacaggacacgagagcattggagactaaaagcagaaagagacaatagtgaacgggagaaaagaccccatcagaatcacacttaccaatgtcacacctcaccccactgggccgcgtgggactggcccccgcctcaccccactgggccgcgtgggactggcctgtgcagtttttcctgcctcccggaggtctgaccctatgctctcaagaatcacggagccaactgggccctttgtgctagcaaaagcctccccagttgctcattaaaagtaagcattaggacctagtgaattgatttacttcgccccagtcctggaaggacatttcagatcagaagatgtcttaaggttgctgacactgctctcaattactgttgagcgcatatgcccatctctgctccaggagtccaggccctgctccgtgggggagtgctggctggcagaggaaaatcaatgcaagggctgcatccgagagggtgaggagtttaggtcatcgctagcgggcttcctttatctttagaaacatgaaatgttccactcattccctttttgaaacatgaatactgaatataaaactctattcaataaatgcaacaaagatgaataagacatcaattccaaagagggaaagagaaaaccctgatcaatagagagagggggcgaagggaagtcagcacagagacacaagaacacaggtgcaggacagtgagaaatataagggagaaccaatgtatcaacgatggagcatctgtgtgtgtgtggggcggagctgggtatcttccctaacacaaaagaaaagacaaggaggaaagaggagaagagaggaagagagggagagaggcaggcaaggagggagggagggagagagggcgggggaagcagtaagaaggaaagaaaactatccaatagattaaaattttgaataaacattatgttattcagaaagcccggtggcttctctatattctggaagtctctagtccatatttgttaagaaaaaaaaaaaaaaccttcttctgaaagcattcagaatttcattttccagggaccaaggtctctctgcctttgtgagcacatccttcctgtagcatccaggcccacaacaaactaaagccctgagtcctttatctttccacaaacatgggcacatgctgatattttcctccccttgtatgagcagggacaaggactggatggagtggaggaaggaagagttagcccttgccactgagcttgctagaatccgaacagggggtacagcaggtcagccatctctgataatcctaatgaggggtacagtagcagtgagtggaagtatctctgtgtgcctttctccacagctactatcaaggatccatttatgaagtgtttctagaacattctttcattgccaaatatcaagccctttcagacacctttacctttcttaacattcctacccagtcgtgtcagaaagttggggacaggcaatcagatagtctggtttccacggaactttgaaatcctttgaaaatcatgatgcacacaacctcaggataaaattgttgttctacgccagatccaacctgatagttgacaatattgggaagccaggaagaaaaacatgaagacttgagttcaggttatatcagttttcaagtgctttaataatgacacaatgacagtgtgtttaggccaacagatcaaagtactgcaaacactgtctgaatgatgctttaaactatgtcctggggcacacacagtcatggtgcccagggctattagtaaccatttctatccagggtagtgaccacttccggggtgataaggaaccaggtgttagttcccagccacatttacccggctggtttcattacaactgtgaaaatggtgatcagcacactcattagctgaccgtgaagggccagtgtacagagatgagctgaaagagtcttggttaatgacagatccaagagagaatgggagcccccaggaaatgagtgtaggtgagcatgacagtgatggactgcagggaggggaggccaggcccctggactcgaggacagacatgacttggttgtgggaaagccctaactgggccagacccctgtacccaccccagacatgtaatctacatactacactgtccctttttacaccatctgccaagagccactccccacttcttttggaaagtcctccctgtgacttgtaaagtgctcacaaccctaacagtgagccatggtccagatcaggctggccacagggcccttgccattctgtctgcagcaactggcccaacaaatgggtgacaatccaaaccatcgcatcatagtcctcttgtaaaaccaaagctactgggaagatgtgagaccaggagtggtcagatttcccaccatccgcagtatctcttccatggaagagaagacaggcaactgatccagactggcggagacggaagacggtcgggaggtttgccagaacctttagatgcatggataccagctccaccagtgccaacccggcaatctcctgcctattcaggagccagtatattccccagttttccatggtcgttgagtaggacatctaaagccagccaccaaatgagttctgatacacaaatgtgacttgctgtgtgacccactaagctcagtgccacagagacatccagatgctctggggcgtgcagtgaccaaaatgcaaggacagggaaggagacaccatgttgggacaccagaagaccaggatagggacaaagaaacattgaggtaaaacagtggactagtgtaacggcacaaacgggtgctatcatgggactgtggagcactgagacggaatattacagagggaaggtatagcagcagtaagatagaattttaaaacattatgatagttcacaggaggcattgtattttaagaatagagcactgtttgggaataatggagcactgacatgagacagtggaactatggcagaggtagagcactgtgatgggatgtggagcactctgatgggacagtggagcaccgcaaagggagagtatagcattgtgaagggacagtgattagacaggcgagcactgaatggtacattggacagccgcgtcaagacagtggggccttgtggcggtgttttgacggacagtggaagtttctgataatacaggggagcactgtgatggagcggtggagcactgtgatggagcagtggagcactgtgatggaatggtggagcactgtgatgggatggtggagcactgtgatggagcggtggagcactgtgatgggacggtggagcactgtgatggaatggtggagcactgtggtgggacggtggagcactctgatggaatggtagagcactctgatggaatggtggagcactctgatggaatggtgggggttggtgaagggatggtggagcactgtggcggggctcagaggagtttggggcaaaaggatcatgaatacatggtccatctggcttgcacagcgagtctgaggcctgtccgtacaacttagtaatattctatcttaaaacgaatttttaaaggaggggggggctggggcatagctcagtgctactattcctgccctgcatgtccaacgccctgggttcaactcccactacaacaaaaataattaaatgacttctttatcatataagtcaaatattaaaatttttcaattaaagaaaaatagcagtgctaacagtggactctggaatgccaacaaaacattaagcaaacgtttgttactccctgccatgctcaaatcaacatgtgtgtgtgtgtgtgtgtgtgtgtgtgtgtctgtgtgtgtgtctgtctgtgtgtctgtgtgtgtgtgtgtctgtgtgtgtgtgtctgtgtgtctgtgtgtgtgtgtgtgtctgtgtgtgtgtgtctgtgtgtgtgtgtgtctgtgtgtgtgtctgtgtgtgtgtgtctgtgtgtgtgtgtctgtgtgtgtgtctgtgtgtgtgtgtgtgtgtctgtgtgtgtgtgtgtctgtgtctgtgtgtgtgtgtgtctgtgtgtgtgtgtgtgtctgtgtgtgtctgtgtgtgtgtctgtgtgtgtgtctgtgtgtgtgtgtctgtgtgtctgtgtgtgtgtgtctgtgtgtgtgtctgtgtgtgtgtgtctgtgtgtgtgtgtctgtgtgtgtgtgtgtgtgtgtgtgtgtctgtgtgtgtgtgtgtctgtgtctgtgtgtgtctgtgtctgtgtgtgtgtgtgtctgtgtgtgtgtgtgtgtgtgtgtctgtgtgtgtgtctgtgtgtgtgtctgtgtgtgtgtgtctgtgtgtgtgtgtctgtgtgtgtgtgtctgtgtgtgtgtgtgtgtgtgtgtgtgtctgtgtgtgtgtgtctgtgtgtgtgtgtctgtgtgtgtgtgtctgtgtgtgtgtgtctgtgtgtgtgtgtgtctgtgtgtgtgtgtctgtgtgtgtgtctgtgtgtgtgtgtctgtgtgtgtgtgtctgtgtgtgtgtgtgtctgtgtgtgtgtctgtgtgtgtgtgtgtgtgtgtgtgtgtgtgtgtgtgtgtgtctgtgtgtgtctgtgtctgtgtgtgtgtgtgtctgtgtgtgtgtgtctgtgtgtgtgtgtgtctctgtgtgtgtctctgtgtgtgtgtgtgtgtgtgtgtgtgtgtgtctgtgtctgtgtctgtgtctgtgtctgtgtgtgaagttccctgagacctcgagaaggtgaactacatcccgtgaggactctttcctcatagttcagggccaaacctggctcagacctcaggcatgagggctgctgtcactcagccactggcagcagcctcagctgtgaagcagctgcttatcttctgactaaaaacagtctcataaacagggacccaggcccattcctggacatctgtcccatccgctcaggtgctccgtggcccctttcctagctctgtttgttaaattcggccactgtggtgacagctccacttgtttggatgtgagcaagaatcagggttcattttctgcacgtccagcgtggggctgcatccaccacactcgttctccatggtaacgcgccatccccttctggaaaccctcaaatctgcttgcttaacagtaatcaaaggacaagcccaccaagtcagtcattggaaaggcactcattaaccgcctttcccagagttaaaaggtctctaacgaggagccattgaaggcagacattcagagctgtgtttccctgggctgtgggctaaattaggctcactgtttagcttgaaggaaaagggcactggtcctcacccggagcaggcaaaaggccagcacattcacccctctgggagcctcacaccagagctagaaagatgccgggtgtgagtgtgtggagtggggcacacgtgtgtggcaccccaattgtgcttcctgctttgtggtcacgctgcctgagttcaaactaagctatttgctgcactcattaaaggacagactattggaagcatttaaaatcaagtgccctgcaattttccaagttgtgatggttccccacaggctgaggagaaagaggtttgctgggcggcaacaaggagagcagagaggaagggcggaaaactgcgctaagaaacaaaaggtcaaagcattgctgtgaaagtgagtgttgtttatttaggtggagtctctctctctctctctctctctctctctctctctctctctctctctctctcccttctttccttcctttctgtctttcttttttgctttcatctctaatttgtgttttgtatctgttcactaacgctatgaagatatagcaagttcaattgaggatttcattgggccataaaacctattaaattttgtctagctctctgtagaaactcccatcagggagactctgaggtcaaaaaggcaggagatccacagagctaacttgttaccaaggacaacctgtgcttcttcctattttacaagatatatacattttcaaatatttgaaatatttatatatcagaactgtggaaccatgcagtgtgaagagtggtgtgtgtgtgtgtgtgtgtgtgtgtgtgtgtgtgtgtgtgtgtgtgtgtgtgttctggtggcagtgggggttaaggctaggccctcttgcatgctgggcaagcactctaccactgagccccacccccaacctctagcacagtatctctgaatgttcgctcatattaaggaaatgtagtcacacaagctcctggtcaagctattcctacaagccaatctttatttttcttttaaagaaacaggacaacagttgtagctagtttgtgtttaaacagctaagaatcgtttaaaactaggtacattttcaggtaaattttgcttcctaacaatattctgattccaaattaaagggaaaaaagtccctgttagggatgtccctcagtggatggagggcttggcccagtacagcaaaggtgttgggttcaatcccctgcgccacttatcgcggggtggtgggcacgacacacaggcctgtaatcccaggcattccagagatggaagttagtgggtgaccccatgcccatcctctgactgagccagtctcacccccatcaaaaaacaaaaattcctaggtgtgtctgtgcacgttagtagcatatttaaactctaatgagaggatattcaaaatcagtgcctagaaattgccttgaatgattctgtttggaaatgagatacaaattttgtaattgcaagtgagttcttactgggttttgtcaaactctcctcatgagtaaacttcatttgtttatttattattttggtgctaggactggatcagggtcgcttgtattgtagcatgacctttacggtggagctacaccccagagagcctagaacatggaaaacaaagataaaattatttcccaaaatgtactgctgctgacttaaaagcagtgtgagacttgagaaaatggtgggtttgtggtttttttgtttttgtttttgtttttgtttttgtttttttttttggaggggtgggcagggtttgtttgttgcttgttcttctattgcaaggactgaacccaggacctcacgctggcttggtacccattccttcatgagtcctcacccccctagaaggaggttcttggttccaggatcccaggcctgtgaaagaatgtttggctggagagataagatcatgtttccttactaatgatggaggcatctcctgtgctgtgatgacacagacgaggtcactccacaggaaactctgtctgcttaaggacaactatggaaaacctcacaggcgtttttactataggtctgtaatcctggctcttcgtgaaaggagttcagtgaactggcagaaaatcgctggctaagggaagccaacatggagacccactgtgaagcacacagcggcaaaaacagacgcccaggtgaaggtaatttggttggccatgcccaacagcttaatctggtgttgctcaccctcacactcacccgccttcaccctacataaatagggctcaacccagttactcacctagacccccttggcagatgtccgtgcgtgtggccccaccaacaataaactgggggttgggacacaattcctgaaagtagtttaggagaaaacacaagtcagaggacaccgttcagtggcggaggcagcataagtaaaaacttcagtgcacaattcagacctgaagaagcctagcagctcatctaccactacactacatacgtgctttccctcctcttgcaggtctgtgagaccagagaggggaggacaccagagtcacacagctaccggtccacaggacaaaaactggagcccagaccccgtctaataaccaggatcttgactgctagcacactgggtgtatgggtatgtggataacgggtgtggtgtggtaggagaaaggcaaaggctgagatgctaatacaatgagatatgaccctgcccatttggacaacacccgtcttcacacagagagccagttagagggctatttggtaaaaggcaatgcacgctgtgggcagtccttaaacatgtgactaagcagcaaggaccttgtagctgatacagtcctgagggtgccagcaaggaggtctgggatcaaggatgaggtgtcagggaggaccatttccagaaggagaactcagacctgataagatcataagcacgactatatctgccatttaccagcttcccctggacatctgcccacgtgtgatgtcaccctcgaccagaaggaggggccaggtggtatgtgttcaacctttttcttttgtttacccaggaaggacctactgggccctgttctggatcttacattatcacagcaggcaggggagatgggagggtagtaaaagtggagaaacagaaagatagatgctggcctctacgtgctttgagtttacacaggcaaatcaagcgacattattgggaaacagagtaaaaagcgttgttttttttttttttttaaagtgcatattaaaagtccagggggaattctggctgaccagctggccatgtgaagatgctggctgtctgctagaaaggtgggctctggtacagtctgcagaggtatgtccaaagaagacagtcatcctggacacaagacaaattgttaaggggaaagtgtaggacctcaagcaacccaaaggaacttgacctacacttacttactgagaggcatcaaaccgatgggttgcaagggaggggtggctcgctacacagtgagagtcattgcttactccacagacatgaagaaatgatagatccaacatgatgaggaagcaagagagtgagctgagcaaaaggggcagagcccaggtggagctgtgaacaggagttctgagatcttactgtaggagatggaaccttctggaaggcaaccaatatgaacctgtcagctcctgcctagatggccagaaacagcccctctcccctaacaccctctctcctagcccaacaactattttttatttaaaaaatttccccacctggctaaaacataaccatgactgatatggtatgtggatccttcaagggccaccaaaagtcctccacaactcacaaggagagaagacctctgcaggacacaagaacttgctgtatgccttctctgccgttaatcctcaaagccgatatagagtaagcaggcagccagagagatttaaaagatggagaccctacaggtgctgtggaatattcctttacactgtgtgaagatgtgtcactgtgatcgatttaataaagagctgaatggccaatagctaggcaggaggtatagcaagaacttctggacagagagagatctgggaagaaaggcggggttgtcagccagatttggagaaagcatggcatgtcggagatgaggtaacaagccatgagccatgtggtggcatgtagattaatagaaatggtttaatttggctgggcgttggtggggcatgcctttaatcccagcactcaggaggcagaggcaggcagatctctgtgagtttgagaccagcctggtctacaggacagcctccaaagccacacagaaagcctgtctcgaaaaacaaaaaaaaaaaaaaaaaaaaaagaagtctccatgtcctttatttgggagctgggaggtgggacagagaaatacttgctacaggccagctcccatgacctacgtttttggattgctattttttttttcttctttatccccagtcatgtgtgttcgggacaatgcttcctggccatcaaataatggccccaagcactccttaacacaaactacccaagccttgcactggacccagaagaatgggaagacaggaaacagtagtccctatttcctgtaaggaactcaagataggaaggcctgtataagcgcaaactctcagaagtgacgtggtgactgctcaggaactctgctctccaggacagtgactggtggatgtggtttggcatttgtggggctgtcaaggagcccaaagatgccattctcctcactccatcactccatcacacaacccagctcttctgaccctccaggaactggtccactgaacgtttctagcggcctgtttcctgccttgttttatctgctctaacgatcgtggaccaccgccttctctgaacactcttgcttgcacgctcttttacagcccagcgccttggctcacccacaggccttctccttcatctcacctatcacccctttctccaccaatcccagctcaactgtcttgcataattttcctgtccagtttcacactcaagcttcactgcctccccgctgagctccccagcattttgttcgctgaatagtttcctctctagccagtctgtcacgtaataaatactctctagagatcactcactttctaagctttcctcatcacccaaggaggtgggcaatagtactgttgttctcaattcatgggtgaggaaacaggctctcacagaggttcgtaactcacccacagtcactcagctctgagtgatagacaatggactggaaccttgacacttgatacccaaacccctcttcttctccactccaatgtcactcagttgtctgcctagtctctgcctctccttactaactaaagctcctccatacacctccccacacaggacaagtgcacagctgatcatggctgaattggaaactccaaagctacgatccaagaggaaggacctggacaaaagatggaagctccaaacagagcctaccaccattcctcaaccttccgacaactcaacccctccatgtgtctgtcagccggggcccttatcatgtgcctggcatgacttcacctctgaatccatatttctccttaagatcaataaactgcttaattgctggaggtggggatggacaccagacagaaaagaatattgaccaggctgccctaagtccattcacactgggcagtatgcacttcacgggggcttaggatagatcctgagcccagatggtgaggcaagaagctaagggaactggggaccatcactgtctctgtgggccggctactgctcttgccccacataaacaggaaaatcctaggggatttcagcctcccaacagcaagttcctgagaaccctggtcgtatcatgcaaccttcatctagagaactgtgtcttccattccttgggacaagagcctaagtggatcttctacatagaagcttaagaataggcagaaacaaagcaactatgttcatcctgggtatgtagccaaaagtatcacagtcagctaagacagtgacacccgaacacccatgtttattatagcactagtcacgatagtcatgatatggaatcagcctgggtacccattggcaaacggatgaataaaaattattgtatatttatgaaggtgtgtgtgtgtatgtgtttgtgtatatgtgtgaatgcgtgtgtgtgtgtgtgtgtgtgtgtgtgtgtgtgtgcatgtgtatgtgtgagtctgtgtgtgtatgtatgtgtgtatgtgtatatgtgtgtgtgtgtatgtgtgtatgtgtgtatgtatttgtgtgtatatttgtttgtgtgtgtgtatgtgtttgtgtgtgtgtgtgtgtgtgtgtgtgaacacaatggagtatcattcactataaaaaagacaggatattgcgtcatttgtaggaaaatggacagaagcaaaaataatcattttacatgaaatgaacccaactcacaaacaaatattacatattttcccttgtatgtagaacttggggaagtatagaagtaaagggatggctgtccaggtgtggacaaggaaataaaacaccctaatttgtagaattcttagatttaaaaaaaaaaaaaaattggcagttcccaaactcaataaagagttatcctcaaaaagtagcaaatcaaacaaagaaacaaaaagcaaaccaaaccattgaaaaggggcttgaatgggcatttctctaaaggatacacctataagcgcaaagatgacaagatacagcatccatggtcatcacggaaatgcaaatcaagaccacagtgtgaccacacccttgcccttgaggctggcttccactgctcctctccactctccatcccggatggagccttcccatgacctccagtaaccctgtgcctcctcccagcaatgagtctatcacagcttgcccatagctgactgtttctaacctcagtttgttcccctgtgtgctggcctgggggcactacgcaatcctaagtaccatgcattccgttcctcttacatgcagggcatttaccctccgcgattaagttctagttctcacaacaacgctgacacacagtggttccagcagtgccattttaagggcagaaaagctgaagctcagagggatgaagctatcttcccaaggccacacagcagagccactgtcgagacctacctcgtccagctccaaatctgtgtatgttcttccttagaaacagttttagaaagcaaggcggagtcagaactatgggatccgaagataagtcccaccactgtcacttccttcaactcttgaccagatgtgacaacccttcaccctgtgtgacctccaactgtgccttaccgtgggccgtttccatatgatgccttgagtttgcggggagccgggtccaagatccctgtagcccacagctgatgggcacgctgggaactcgggatctttaaataggacccctgagctcaagcattgtttcctcagggtctcaaagtcttgtcccaaatacttcacagcattctggttagagccaagaccctcagcagctgcgcgttgcttggatactacagctgccctggctgccatggctgcaggatggactgcaaagcagagctcctgtgtcttctcagacgtctgccctatggggctgctgccctataaagcagcatgcagggaggtggggcgcgcaaacttttcacctgagggaggccctgctccaaagggacacgatgagtcattaacaggatcaaatatgtacccaaggtgcccgtaaatctgccccaccttctcctgctgttcacactctattcagaggccacaggtggaggatatcagaagtcactggaagctggctagtgcaggggctggatcctgccgcagagcctctatgaggagtggctctgcccataccttggttttagtccgatggaaataacttaggactgtaggtcttcaggacagaaagtggataaccctctggttggttttttttttttttttttttttttttttggttttttgtctctccattttctctctccattatttttgcatgtcaatcccagttccctctgcctcccctcccctgcctgccccccccccaactaacaccctacctatcccataccctttctgctccccagggagggtgaggccttccatagggggtcttcagagtctgtcttatcctttggggtagggcctaggccctcccctgtgtgtctaggctcagggagtatccctctatgtggaatgggttcctaaagtctattcctatgctagggataaatcattagtgtgtgtggtgctttacctgcatgcacgcctgtgcatttcatgtgtgaagtgtccttggaagccagaagagggtgtcagagtccccgaactggagttacagacagctgttagcttccatgtgggtgctgggaatcaggcccaggtcctctggaaaaatggccaatgctcgtaaaccctgagccatctctccagccccaacttctgctctttacagtcattacatgtatttttatttgttacagaagacacaggcaactagtacaatgtgacaaaaattctctggaccacttacaacacaggctctctaatagcctgaaccattgccaccatctctgagggagttctggggggctgtaagatgcctcagtgagcagaggacttgccacacaagcacgagaagtccaaggccatcttgagctacatagtgagttcaaaaacagcctaggctgcatgagatcctgcctctaaactgaaataaaacaaaatataaaatagtcatgattcagtagatctggggtaaggctcaagaacccacagtccttagaccattaccccatagatgattctagaaaaagggttcacaccggactctgaacctacagatcctcagcttcatgttgctggtaagcctcgtgtccagccctgaactaggtacttctgagtgaaaaaaagcccatgcacctcgacacgcatgaaaaaggaaagaacttggtttctaaggattcatcagaaatacaaggtcagattgatcttcagaggcttgagtcggttatctgaaggacttggctcttcctatgccttggagtcggttatctgaaggacttggctccatcccatcccttggaagttgcctgaaacactgaggattctggaagcccagcatctctgagttggtagtggggggagggcttattcttattcctgactctgtcccctcattgcctgaagttcatgatgagccacaaggaacaatgtggccatttcaaacccggatctgaccacgccagcaagcttagaagggaatgggtctcctgcatggctagtagaagcttaagcacactggccttgttgactttgccacctgtctctgtgtctctccttcctccatgctctcccacagaaggcttgccttttgtgtatagaatgtcaccctcgtgcttcctcagggctttgcccgtgctgctcctgccaacttaaatgttctgctctgccctctgcttacccttcaggtctgtgccccaggaaaggttttccccaaccccatccttcagatttagccaccgcccccttttacactatcagacgaatatgcaaggccctgcccagcacagactcctgcaatcagtgaattaaagcccctctgtgccatcagtctgggcattccacaaggacacctatcagggctggctttgtcattcaatccctggatcctaggacacttccagaaactcagttacatgttcgttatatgaagaaacaaccataaaccaagatgtccagtcactgagtatatctaaaccagctataacagacctggaaaccccacacagggccactagttaattaataaagacttcaggggagtgtttctcttcctgtttcttccctatgcttccccaaagcattcccctcagactgacaggaatgggcatgccttcctcctccaagcacagaggcctcacagctggtgattttgcttccccacgaaggagctcctttggggctagccatctacccttccttccctctctcccttcctaaattgcctcactcctgatccagataccataccaccaagcccttcctctgcatgcaggcaggtctgagctgctgcaaatagagccctcatttgcccagtcacggaatgaatggtgagtggcagagggaggccttgctcaccaccccctcttgatcagacaaccagtgtctacctgttatccagccaggcaccacagaggaagcagcctggactcacagtctctgtccatctggacagatgtcttcccaacctcatgcctgagacagctgcaagagccagagccagctccctgccaggaagcctgaggatccattacagaggcaaggagtctgtacacacacctgcctggcagcccctacttaataagaacagctcttggcaaacagcccaagtgcacatcaaccaagttggtctctgagccttgcccacagacaagccctcccctgctacggaaagccaggcagtagaactcccctcagtgagaaagatgaatcaccctggttgcacccaagagcccaagtgtgcttctcgggcaattaaagcctgcaaagcttgttgtcttgcatgacggtagcactggaaagggatgggtgaaagctggcagattcttcccctgagcctcccaagttccgaatgctaagggaagcaggggttgcctcagtgtcaagagcattttggggttctcatacacggctggcagaaatggaaacagtacagatgttttgggaaacagtctggccattttgcaaaatgccagacgtagagttgcatggtaactcccagcagcactccacagttaacacgcaccgaaaaagaatagaaagtaaatgtccactcaaaccttgtacacagatgcttgtacaatgaagagtgctccataacagccaaagggcagaaatgagcagccaccaagcaacgcgtgagtagataaacaaaatgtagtacatccaagggaacagaatagtatttagtcctaaaaatgagtgcagcgccgaggtgtggtgtcatatacctaggatctcagcacttgggaggcaaaggtcagatgatcacgagctcaaggctagcccagatgacccagcaagacccaatggctggcagggggcaagggtagctcacagtacaactcccaacaaggccctggattctatcccctaagagtgaaatactgctgcatgcatgaaaactttatgcaaattaaacaaagctaatcatcaaagccatgtcactctcaaagtcactgtaatgaaacatctaacaatcaagtttcaaaattttcatccttcatggcagggagagcctgacagcagagatgcttacatcatgacagtcccagagcaagaatggctgccttctagaaggctttcccttttgtccttcccattttcccaggctccccgcctacaggatggtgccatccatattcaaggcaggattttttccccttagttagcagtctctataaatgccttcacacaccccagaatgcttttattcatctcttaggcactgctcagtctagtcagattgacatcaaatttagccatcatgtccagttacacgagacttccaaagctgatcaaatcgtagagacagaaagtgactaccaggactggaaagatggggcattgcaactgactgctacgaggcccacagcttcctttttgtggtgatagacttagctagagccggtgattgtacaactaagagtcacgccttaaactatgcctgaaaatgatgatgcttatgttgtgtggaatatatctcaatacaaaatctaaatagagctgggtattgtgactcatgcttgggatgtcagcactcgggaggctaaagcagcctgagatgcagagtgaatttgataccacactatatgacataataatgaagggtgagggtgtgaggaggacaaaggaggggggagagaatgggagagaaggaaggaaaatattacataatggaagacttgtagagatctgagtccgacgctggcttcccctctgcccaggacatcaaatggtctgttatgcagcagggttctggggctgtgcacagaaccttctctagccacactaaagagaagataaagctgaccaagtgacagtgttggggtacatccctcaccaggtctctgagatcacttcaggccccctggggttatacttcaggccctcatccctggcaagaaaggacccaatcgagcccaggtgagagactgcctgagattgccctccagtggccaatgcaggtcctgctgaaccactgtggctaagacagagtgataaaccatttattggaataaactaggtttacacagagcttttatatccattggttgatcagactcacagcaagcccacagccaaactcacccaagatcactcaggtagtaaatttgagttcaaaatcttctgatttgatattttgttatctttccaccactaaggccaaggcatatgagtaacaggaagtaatgggatgcgccacccacaagaactctaagaaggcagtgggcacagatggacagagcaatagagaacaagtaagtgtagcctgtccctaccaaagttcagtgccaagacaagataaggtagcactcacgaacagagtgatgagcgctgaggtccaggagtaacatgggggtattcggggaaggggtggcattccagttatgaaagggcttaagggtagggattttgagaaaaggtgtgagaaacaagaatgtgagccatgagggacttgcaggatagcaatggcaatgaggaagaccctgcacacagcatggcggtgaagaggaactctacacaacatggctgtaaagaagaccctgcacacagcatgaccccttaacacatctgaaagtgaagaaaaaccctgcacacagcatggtggtgaggaagaacccctcacacagcaccaagagaataccatgatgcactgcagagcagtagagaagccgcaagataaagagacactgagggatgctgaccgcagttacccagcaaggacattgcctcagaattagaaggcagcttctgggaatgaggcaaaaactggtggcagcctaaatagatagttgcagcaggattgaacaagagggagactggttctcaagctgccttctctgtgagggatgatgggggatgagtaaagaggaagagatacggccagggtccttgcatactacggcacatatagaatctgtacatactactgtacaaataaaatcaatttctctctctcactcgctcactctctcgctcgctcaggtgctcgccttcccctcctcccttcttctcttggcatagagttcctaaaacccctggaatttcccaaacaattagggatagtaggagcatcttttatgccaataccaagtcttcaatacaagttcctaacacagagctcctaaatcccttggaatttccagggtggtaatgcatctttgcttttaatgaggtatctcttgggtgggcttctggatcaggggtggttacaaaaagaaaaagaaaaatgccaaaaaataaaaaagctaaacaaacaaataaaaatcaaggaggctaccaagagcctggaacttgcattaaacccctattccccaggaaggaaagtactggattgaactaatctccatcctggttacattttaagttcaaggctgtggttggaaaggctccaggctgtgggccatgtggcacgaaggggagaaggtacatctagagagggcttaaaagctccagcccctccccacacactcagaccctgacgtgtgttccaaatggctacttatggcatgtagtcttctaccctaagtggtcaccccagtaagtaaacctaccctgagtcaagtcagataagctattcaaatcaatgaggaggtgaatgtcttaggaaccttcacttgtgaccaagttgtacagggagtggtggcacacttaaagcaatatgattccattacttgggagactagaacagatggattttgagtttgagcccggcctgggctatatagtaagacaagaccttgtctcgagagatgattttcttaaatttgaccaagttgaacaggagtgggcccgtgggtacccaccactagcaatgagatctaaagagggggcagccttgtaggtctgaaccctcaccacagagggcctgcagaagctaatacaataaaagacacagctagcattggagaatcagtcagtgtgagggggaccccaggtctggagtcagaagcagagtagcaaggatagctctgcacatctctcaggatggtgatgagtctgaccccccccccagcctaacctcgcttcccacacactgaggcagctcagaattcacggtctagggaaatggggagatgctgtcatttcctcccaaaggaaaccactcattaggaaagaagtggcacagagctgggagctcttatggttttagaaaaggtcatagagacaggagctggagcgtctcacagtcccaagcccttcgcagactcagcatgcggtctcaggctgatcacatgcactgggaggttgttcttgctgggtacctcgtcatcacacttccctgcctttagtccctgataccaagtgttcatggacatacctgaatcattgcaccactaccatcaacaccacttgatttggctttttgaaacacaggctttactctgttgtccaggctgatctagagctcactgtacggctcagatggagcttaaaatgtaaataatcctgcagcctcagtcatccaagggatagacgtcccttggcttcacatctggcttctacttttctttttctagggagggggtgtttctagacagcgtttctctgtttagtcctggctgtcctggaactcactttgtagaccaggctggcctcaaattcagagatccgcctgcctctgcctccggagcgctaatattaaaggtgtgagccaccacagcctgatctacttttcatttcacaatcaagttccatgcaagcgatgtacatatagtgagcacatacccactgtctcttccttgctgttcctccaggcagactttcagggtaaaaccatggtccagaaccccttgggccactgatcacactcatccaatgttgactcttagtcctccttgcatttgatctgcaagtggtaaattaaacacaggatagtcacctttccccctgaaaatgggattggatcccaggaaggaaaccctagaagaacaagaagaggccatacccagagcatagggggagaggctggccctgccaggagcatggcaggcatcaggtatgaaagcaggcccagtgggaagggaagtgtgagcaccgagcctggaaactccaatgaccttcttggaaataggcattcaagccattagggaagagtgaaaatgaggcagcagtgaggtgggaagagagagatactgagactgagagaaagaacaagacacataattctagaaggcagcatctgggggcatttgagttggtaattatcaatttaacatgggaccaatccgcatatgtgtgatttatctagtacactaaccaattataccacacttaatggtctagaacagcaaacatttattatctcagtttctgaggggaatgaattcaggggtgactcaaaggggctgcagctttgagaagattgagtggagtggcagaatctagaatcaagatggctcacacgcatgctgtgagtcagatccttcgatcccctaaagggactttctgtgggctgcttgtgtgtcctcagaacagaggactgccttatgtttggccatgtgatcccaagaaaaggcagagcatgaagtgacacataactacctatgatttattctactattaaagcaaatggctgtgtcaagccttctctagccagggagattttagcctctccctttaaagagcgggtctagggcacttctttaaactactacagcttgatggtatattctaggccagtcacgtcctatgcaggtcacacacgtgtgggccaaaagctggattaagcagagttaggcataagaataggaagtcagggaccagagattcacgaagctgggcctcctgaactcagaaggtggattatccaagtggctaatcacagctccaggggcctagcaggacaggtgggtcctgatgcccctgctcccccgtcagctggccttggcctgggccaaccatctagtccagtcctgctctcagctgagacactcattgtctttgccccagcacaacttagactccccattggtccatcacagcctctccagtgccaactctttccactaagtggcaaggtattcctttgtttctcagcccaaattcccaagaggggagatcctaattgtcgaagatctttccttgaatcctgccacatgggccctaaaggtcacttactgaaccaaggactggctgctgtggtgtagggtggcagctctccggccacagcttccaaagccctctctgtttctccactccagggatcggtgcacgagagctgccagcaaccagccttgtcttcctctgtggaaggtggtgccacaatatcaggcagtcaagaccactttgccacacatcatggaagccattagaagctctgctgagagcaacatatgcccctcagggggcggtctgagtgacatgtcaggaacataagcacggtacattccctttgacggccagatttatctgaagatttgtttctgttgttgttctgatttgattgtaagaggaattaaggtggccagccatcgtggcacatggccactttaaacccagcactcaggacacagagatagaaggatccctgtgagtataagagcagccttctctacacataacaagttccaggacatagtgagaccatgtctcacaaaaacagacctgggaccttccttgtaccactcctgtcggtgcatcggtaacatgcaatgaccaccatgttctgccagcggggaaatgggaccccatcacattggccttccatagcagaatcaaactttgaactcaggtttgtctcaactaatgccaagatatgaagatactgtgttggccctgcttgatgtggtggttctcaaccttcctaagctgtgacccttaaatacagttcctcttgttctggtgactccccccccaaccataaattcatttcaatgctacttcataactgtaattttgctactgttatgaattgtaatgtaaatgtctgatagaagaccccaaaggggtcatgttctaaaggttggaaagcactggcttaaaagggtcaggaattattttataatgcgttcaatagtcccaaagacttggactaattcagcctactgtcttctcacagacaagattccccatggggagttcagggttcccactgggagtccctggtagattccccacccacccacctacccaccacatacacacagagaaagaaggcgggaatcctgtagtgagaacccaggacgtcacaggaataagatgtgctagatcggtggagattctagctagctcaaatcagtggttacaaatgttggaagcaaaggaaagcaagctgctcccactgcagcagctggtggtctctgctgccctctaggacctaattcactcccaacaagtctgtgggcttgcttaaaactgcctgatttagcattagctctgtagcaaccttgcttctggcctcactgaataattgctgctggtgctttggaaaatgcctacataaaagtacatttaaggcacatttttaagtgactggggatactgagaattgataaagggaaagaactatacatttaccctggctttcctgcgtggactgtatttcaggggtaattaaataattgataaggggtagagagacgtctcagtagttaagagggctgctcttgttgagttcaattttcagcactcacatggcagcacacaactgtctgtaactccagtcccagggatccagcaccctctctggcttctgtgaacaccatcacacgcatggtgtacagacatacatgtaagcaaaacaccgagatgcataaatttttaaaaaattgccagatgtggcaatgtgtgcctttaatcccagaactctggaggcaaagacagacagatctctatgaattcaagtccaggctggtctacagagtcccaggccgccatggctacatagaaataccttgtctcaaataaatacatgtaaataaatgtgtttaatctaaaaataataatgattgataataaatgtttctccttatggaagaactacagctaatcagggaacggtgacagaagtcaacgttttttcagcctttaatggtataatggacgtaagcagctgtccccaaggatgctggcaggattagactagaggctaataagacgctctggggcggatggaacaggctgagacacccgagcctcattgtcattccaagcatctgcgcctggaatacccttgtcttgtaacatgctaaaacaggatgacaacacaagccacctgtgagaaattctgtcttcttccccgaaacaagttgaatctaaccaaacctgtgttaactgtcagtgtaaaggaataggagactaggtgggatttctcagcccctgaaccactgactttatggtctgatgaccaccaaaaattaacaggataactaattaaccaactgtcttagggttttgttgctgtgaagcgacaccatggccacagcaactactataagaaaaaacgtttataaaattcgggctggcttatagttcagaggcttagtccactaccaccacagtgggaagcgtggctgcacgcaggcagcacgcaggcagcatgatgctggggagggggctgagagttctacatcttggttcacaggcagcgtaagtgaatgtcatactaaccccaacttgatcattcgagacctcaaagccctccccatagtgatgcaccttctccaacaaagccacaacaactccaacaagaccaaacctcctgatggtgctagtccctatgtgcccatggaggccatcttttttcttcctgaaacatccattcatcatattcttttgttgaatctgctgcttaagtacacagatatgtctggggactatacagaatttgcccctgcttgttgggatgtatttaaaaaatacagtttcccctcttcctctcctcccagttcccccagcccacccccaatccactcctccctttctctccagaagacggcatgcctccctagagtatcaaccaaacatggcatatcaagttgcattaagactaggtacttcccctcagattaagcctgaatgaaacaacccagtatgagggaaagtgtcccaaaagcagacaaaagagtcagagatagtcccttttcccaatcttaggagtcacacaagaagaccaagctataaaactgtaacatatatgtagagggtataggtcagtctcatgcagtctctttggttgttggttcagtctctgtgggaccctctgagcataggcatgatggtttgaaagacaatgatccccaaagggagtagattattaggaggtgtggccttgttggagtaggtgtggtcttgtcagaggaactgtgacatgttgagacaggctttgaggtctcctatgtgctcaagccactcgcattgagacagaccacttcctggtttcttcctagtcaagacgtaggactctcagatatttctctaacgctatgtctgcctgcacaccaccatgtcatgccatgataatgaactaaacctctgaaaatgtaaaacaccccaattaaatgtttttcctttataagagttgccatgatcatagtgtctcttaacagtaataaaaaccctaagacaccaggttagttgattctgtaggatttcttgagatgtccttaacccctctggctcctacaatccttcccacccctcttctgcaggattctccaagttctgcctaatgtttggctgtgggtctctgcatctgtttccttcacttgctggatgaagcctctctgatgacaattgggctaggtatcaatctatgagtatagcagaatatcattaggaattatttcattgactttttcagttgtgtttgattttatcctaggtctctaggccacctaacctctgggtcctgaccctccgggcagtgtcaggggtggactctctctcatggcataggtctcaggctggaccacaatttctgcacaacatttaccccagcacaacttgtaggtagtacaaattgtagatcaaaggttttgtggctgggttgtcgtcccattctctccaccggaagtcttgcctggttacaggagatggccagttcaggcttcatgtcccccattgctaggagtcttagggaaagtcagtcacccttgtagattcctggaagttttcattgccctagatttccagcttgtctccaagatgcccccctcctggttcagttatcactcccgatactctcttcctccatcccccaaacctgatccctcctgttcccatcccctgtactgtctattctatttccccttcctaggagatccacgtgcccccctccaccttgaaccctatttgtacttagctactctgggtctatggattgtagaatgtagcatttttattcaaaccaccaccaccaatctactggtgaaacagaataactttaaagagctgatgaaaaacaaaacacacataaaaaagaaaaagaaaattgtaggggaagctgtagccacacctacttaggggctggctacacgtgtgtctgatcacacttgcaagggcgtggtcagggtgactagagggagaggtggtcaggtggctgggcactttcagtttggcttttcagcttgctgtacagactgctgccacgccagctggataggtcgctctgtaagtaagacttttccctattaaatacccttgtatttctacttggctcccatattggtaatttcccattatatctggttgtcaggagcgggatattggaaacctacaccccatttgtgacagaatgtgggttccaccaggcctgcggcctaggccaggaaaactccctctttcaacaggtgctcctggctcccagccaacccgctgcaccacacaagcgcattcctgctgcagctgagctgctcagaaccatccacccagcttggagaaagtttctagctgcctagggtcgagtaggcctcggctttcagcagcagcttcccctggctgctgctgcggtaaagcctcatctctttcagtggttgaaccgctaggccgtatactctctaaaataagcgcagccgctttgtgacctctctccactgctaaacgctgcaccaagtagctgaacgcctgtgccacctgctggtcaaaggtagttactgcatctggagtagaaatcaggtaaaattatggcggaatatttatcatttgctaaaattagtaatatttttgcttattgtgtgaattcaatgtttgaggaggatgttaatttgccaattactggcctatatgccataatggcagttagcttgctggtacaaataatattactagccagaggactcaggaatagggataaggataacctcaccacctacttacaggaaataacagctttacacaatgaggttttggagaacagattaggtcagatcacaattgtgcagcaagtagaacagaaattggatgataagcttgcctctgtgtccaatacactaaagacagagctgtctgttacccaagatgagatgcagcgtatttaccataagataaacacagagagatcctctatgtctgaggccttagaggctaggctgtcagaagactgtgacaagctaaagaatatctgtagccagctagaaactcagataggcaatgttacccagaaactagatgcaaaggtgcaaatacccaggatagggttgaagaattggacaatgccattcaatcaattattgaagcatccaaggtagcagatcacaaatttgagtctagattcgaatgtttggaagataatttatagtacaggactgacagattacataggtccatacggtcaattgctaaggactcaaaatcaacaaatcatgacctcaaatctagactccaatacctagaaggcagtttccttgccatccagatgctgcctaaggatgatcatattaaagacctagaaaaacgtgtagaggagcagttagagcaatttgcagattcactaacatgcttggaatcttttatgattaaggagattgaaacttttcataaggatatcattactaaggcttaaagatcattgggatgtctcagaggcagaatcactccaatcccaggcacctactccacccaggtatcatgactattcctctaaggttggtactcgtacaccattagtgtacccagctaccgtggtagaaaagccagcttctaaaccttcatggatggatggcttatgaatggcaacctacacagctgaaggatcttaagaatattaaagaatcagttgtctcatatggtctccatagcccatacataaaacagctattacattcatgggcaacctttaacagggtgaaacccacagattgggaacgattggtagcagctgtacttgagaattcatgccaaatccagtggaaggcattggtgagggaagaggtgaagctccttgagcgtcagggcataaaggaaggttttgaagcccctctagataagcttcttggtcagggtatttatgctgacccacaggttcaggctgaatatgatgatgatatactgtcccttcgcaggaaagcagcattaaatgcctgggataaggttcgtgagccaggagaacgtctagaagcttataccagaatagaacagagacctacagaacagttccaggacttcttacaaaggttaactagggcagtagaattacaggtaacagatccagaaacaagacaatcaattatatatacaatagattatgaaaatgcaaacccaatatgcaaaagaatacttttgcctttaaagatcagatcatctccgctagaagaataggttttgcatgcagccaaacttgactatcatgtgcaagatactggagcttgggtaggagaagctatttcggaaggtttaaaaaggcaacaggaaattaaaagttctagaggtgaggatgcaagggcttgggaaggagaagcaccttacagaggtcaacataggtaccaagaggctagaggttactactactgtgaaccagaaccttgggtaggaagagccttcccctggagaccacaaaggcgccaggaacctagatgtttcaactatggtaaaatgggccatactaagagaaattgtagacaaacgaattctaacaatgcctcatacggaaggccactgccttctggattgtgtagaagatgtggtaagggcagacgctggaccaatgaatatagatcgaacagggacatacaaggaaacccgttaaggccgggaaaccccaaaggggtctcaagaagtcccccactatgagaaaggtctggtcattcccagtagcagtgggagacaatctctcacaggacgaatagacagttcttcgcctattttgaaaaatgatactgctctagatggtagtttgaatagtgatgaagaatcaaatgtgaatggacaaaatgataaacgcatattttggcaagcttctgttaatgataaaaggtctcagttgaaagtgaaaattaataataaagttatttctggcttagtagacactggggcagatgtctacccacaagtcttggcctcagaaatggcctcttagagaggcaaatgtacaatttttaggaattgggactctatctagagttcgacagagtgttaactcagtggtctgcactggaccagaaggacagaaagggatactgaaaccatactcgagcttgggtaggagaagccattttggaaggtttaaaaagacaacaggaaattaaaagttctagaggtgaggatgcaagggcttgggaaggagaagcaccttacagaggtcaacataggtacttgtggcagatatagctataaatctctggggtcgtgatcttttacagcaatggaatactcagattaatattcctccaacgttggatataaattatgcacaatcttcagatagtagaaaagatctgataagacgctatggaaaacggttaccatccatccatgctgtacagaaactaggtacaaatgatggaccttcagaggagccaaaggccctgccattgaaatggcttacagatgaaccagtttgggtaggacaatggcctatgacctctgagaagctagaggctttagaaaagttagtacaggaacagctacatgctggacatacagagaaatctaccagtccttggaattctcctgtatttgttatcaaaaaaaagtcatgtaagtggagaatgctgacagagctgagagccataaataaggtaattcaacctaggggccctctacagcctggaatgccactgccttccttaatacctaaaggatggcctatcatagtcattgatctaaaagactgttttttcacaataccattacaggaaaatgatagagaaaaatttgcatttactgtaccaactcttaataattcacagccagttaggagatatcagtggagggttttgccacaaggaataaagcagtcctactttgtgtcagcactttgtacagcaacctttggaaataattcgtaagaaattttcacaatctcttatttaccattatatagatgacattcttttatcagattctaataaggaaactttggaacgtatgtttgaaatggtaaaggaagttctgcctcgttgggggttacagattgccccagaaaagatacaaagaggagattctattaactatttaggttacaaaatagacttacaaagaatcagacctcaaaaggtacaaattagaagagatcgttattaaactctcaattctcttaagagattattaggggaaatttctcaattacagatgattattggtgtagaaggtcatgacttaaagcatttaaaaatggcccttaaaggtgacaagaacctaaacagttcaagaatattatctgctgaggcagaaagagttacaatgggtagaaaacagaatattggatgtgcatatagatcggataaaccttaatttagattgtattctggttatcttgccatccagagaatacccttctgggattctgatgcagagggaagacactatattggagtggatatttctgccacataagcagaataaaaagttaaagacatatatagaaaatatttctgatttgattttaaaaggtaaattaagacttcgtcagctgactggaaaagatccaacagaaattatagtacctttaactaatgaagaaacttcctccttgtggaaggataatgaatattggcaaatagctcttactgactttttgggaacaattagcaacaattatcccaaaactgacagaattaaattaataaaaaagacagtctgaattcttccacatattgtaagacaaactcccatttctggagttcttaccttctacactgatgccaacaaatcaggtaaggcaggttataaatcaggtgaggtaagtaaagtagttcaaagtccatatacatctgtacagaaggcagaattatatgcaattctcatggtacttatggattttacagaacctcttaatatagttactgattctcaatatacagagagagtcgtgttacacattgagactgcagaattcattcctgataatacagaattaacttctctgtttttacaattataggaaactatcagaaacagaagtaatcctctgtacattacacatatcagatcccatacgggtctgccaggcccactagcacaaggcaatgatgagattgatcatttattaattagaagtgtgctagaagcctcagaaattcataagaaacatcatgtaaatagcaaaggtttgaaaaaggacttacccatcacttgacaacaagccaaggagatagtgagaaactgtcctacttgttccttttataatcaaactccattgccagcaggttgtaatcctaagggcattcagagaaatgaggtttggcagatggatgtctttcacttttcagaatttggaaatttgaaatatgtgcatcatactatagacacattctcagggttccaatgggctactgctcttacctctgaaaaagctgattctgttattacacacctgctagaggtgatggcagttatgggtatacctgcacaaataaaaactggcaatgctccagcatatgtctctacaaaattgggacaatttttcaaatattataacataaagtatgttacctgtataccacacaatcctacaggacaagcagtggttgagagatctaatagaacacttaaggagatgctcaacaaacaagcttggaagactaaaccccccaaacataggttgcataatgctttattaatgctaaactttcttaatgccaatgagaaaggacaaacagctgcagaaagacactgaactacagagaaaactgctgaactgagtcagccagtatacttcaaagatgtattaacctctgtatggaaaccaggacatgtgttacgttggggtaggggttttgcattggtttctacaggagaagaaaaactttggataccatcaaagttgatcaagattcgagttgaaaaggaaaaatctctcgacgaggagaaatgacaggtattctactaaggtatatcttataaactaaatagaaacctcccaaaggaaagggaagtgtttttgctcttatcttcacaggaaaactcatctccagaaggcaaaggacactgcatgggtagatacttaagaagagaaggtagctataaccatcaaacaaaaggaccgtgccatatggtaaactttacagctgtctctcagagaactctatttctctttttctagtccctattcaattagatcaatgctggatttagaggtggctttcctcctctaaaatccaagcacgttatttaactaaactttagagtattgtattgtatcaagaagccaattgatgtaatacagaataaaagaagaatttggggactatctttgtcttttcttggatctttctctcaaggtgtacaccctctaataattgttatgctttcatggttgccttccccagtatgtgtacatcacaagcaaacatttctctgccaactatttatgtttgagtcccacacagccagtgaagacctgcctgacagcaatccctggacaccccggaaagaaaatgggccacaccccctcgactgccctggatccaacttgctccatttctacggacactccgtccaaagcttcaggtactgacttcaatcaagttgaggattttaagcaagatcttcaatcaagcgaatcccatctaaatgaactggatacaatccattcaagactttcactatactaacattttcttcctataggaccccacaaggctatcattgtcccatttcagcaggaagtaacttagaggatactatgcccccgttcctcattgttgtcacttagaatagtgtatagacctagttaggaatagcttcctattgtttatggttgggactggaaggaggtgttcaggcttgaacatctctttcagatgacttagggtttagttaaaatagatagttaggatgtgacataagcagattgttgtgtcttcttatatttcacctttatgattgttaatatcggatactttacactgttaagtcttaatcctcttttaggctaaaaggggaattgtaggggaagctgtagccatgcctaattaggggctggctacaggtatgtctgatcacacctgcaagggcgtggtcagggtgatgtaagtgagaggcggtcaggtggctgggcactttcagttttgcttttcagcttgctgtacagactgctgccacgccagctggctaggtcactctgtaagtaaggcttttccctattaaatacccttatatttctacttggctccgtattggtaatttaccactttagaacatagaatccatgaggcaagtaagaaagaaaacagtaagtttaaacaccaataagtaggtctttctgttggatctaaataactacatttgaaaacaaaacatttgttggggtgtagctcaatgtagagtatgtgttcaagatctgttgtagtttttttcagttgctgtgataaaacagtctacccaaagcaacttagggaggggaggtttacaggattagttccttttacacttccaggtcacagtccatctttgagagaaataaggaaggaactcaagacaggaaccagaaggcaggagccatggatgaacagtgcttgctggcttcttctctggcttgttcatctggctctcttatgcatcccagaacctcctgtctaggggtggcacagcccacagggctgggaccttccaatgtcaatcaatacagtctctcacagacattgctacaggcccatctgattgaggcaattcttcctttgaggttccctcttcctggttgactccagtttgtgtgaaattcaccaatagggtcctaggttctatctccagaactaatatcgatctgttaattaacccttatactagaaaaaaacaaaaacaaaaataaacaaacaaaaaaacagcaaagccatgcagcctaaaggctaagaaacaagaacaggggaaatgtataagggatactaagaaagtgggaatagctgtgctaacgtcatagagactacctcgaaagcaaacaagtgcttgagataaggagaactctttcatgacagtaacagataggttcattgacaagatacaataaccagtttaattctgtataatcgacacagcctcagaatacacgaagtaaaattttgcaggtcaaaacagcaaactgtaataggtaagtgtgagattgtaatgcaatactattagcaactgataaaataaacagatgaaatatggacatggacacagatgatctgaacaatatagttaacggtgccatcccagtcctgtagagagaaacaagatacagagagagaattctaatgccatatgcctctgcctttgcttttccgaggtgtaactttattgtaccaactgttctccaaacctttctagaatctgcacaatgcttttagtttttgagttttcacatttctgagaggtatatcacatagttttctatcttattcatctaagtgaacagtttggtggtgagagggttagttttgtcaacctgacacaatccacagtcaccctggaggagtctcaatgaagcattgtctagatcaggctggcctgtgggggattatgtcttatgttatctggagtgggaggccccagcccactgtgggcagtggatactgggctgtataaatgagagagagagagagagagagagagagagagagagagagagagagagagagatgagcactaacgatcatgtatgcatttatttttctctcttcttcactatgcttgtgactgactgcttcatgttttccttggctgccatcgtgatgggctatagccaggaactgtgagctaaatgaacacttttttctcccaaagctgtttttgttgggctactagagcaacagaaacaaagtagagcgggtggcattcggtacagtcacatcacagtgcaccatccccaccatccatccaccaaactatctctaatcttgccagaatgaaagtctaagcttatgaaactacacttgactctctgcccagcccctggcagccaccactctactctgggaccacattttgactgtgtttctccttgctgactcttgggattgcttgcatacacacagtccttctgatatgtgcaggattgggtccactgtagagaaaacagagttgtgcaaggaaagaaaaatgatgacatacaccaatgaggtttggccatgagccttctaatctgaagtttagcagctacactaaagatctacccgagtcttcctcatcacacaggtgatgccactttcacattctagatccacagtgggcttccaagcctggctgcttactgcttaatatccccagtgagccctctgtttgggtccccccccccatcacagcctggcatggaacttcctttgtcacgcccttagacttcagccaccagtcagcaggacccagtcctaacctgtatttatgtttgctttgggcttagtttgaggtgatttctgtaacttatatcaaagaatcactgaactcagtcttctagtaactcttaaaatttaaagacttcaggtccgttttaggtttacagaaaaaaatgacgttcccacaaagtcccttaccttcaggcccagttgctctgttgttaacagcttggggtacagtggtacattgaacatattgtcaccacagtttcaattagagttcatctttggtcctgtgcattctatgggcttgtacaaatgtataacaacatgcgctcacaatatcgcatcgacagaatagtttcactgccctaaacctcctccacacgctcccattcctccttctctccctccccaccaaacacaaagcaacaatctttatactggccccatagtttcatctttcccgatcttttgatagtagttatatagcatttgggctggtcagtcacttaataacatgcattaaagcttccaccgtgtctttttataactttatggcatccttctctttattctttaactacacaacaacgctttaaagagtaaactccctatgctggtagtaggtgggagaaggtcctcccagcctgcctccttaatgcgccttctgatcgtctcactggctcttgctatttgactcacctcacgctctgacaatgctttactttgtctgatattaacggatatggccagcttctctctggttagtgtctgcgtgatactgctttcttattccgtttcactcttaggcacacttctgcaaaaaacagatcagcccatcactggtgggatcctggttccttaaaggttaaatcaatcctcactctggaatagacccgaactcctggttgggatgcaacatcatatgtacacagctgtattctgtttgctaatgctctcttcagaagacagtggccaagctagtagaggaggtggctctccacaatggaacaattctaaacagcctgagtgtaacccccggctaatcatgttcccaaccactggagtggcccttatccaacacatgataaaagagaagtgtggagacccagacatgttagcctaatgaagtgtctctgatagcctgtgtatggagcagagcgtccctcgggcacacagagctttgccacaactgtgtcacatttgacttctccttaagatccaaactattccttcccttcctacccacagatgttggtcatagatataggtatagatatagataataaatatagatagagaatcagactccagctcagcatttacttctgggaaccagcagcacagcccaggggactgtcaacatgggccacaacactgcagtcccaaggcctgcatgcatcttagttatcttctgtggccatgttgaaaacataaagttttatggcttagttaacaaagatgcagaaaaataagtcaggaaaattctatgattatttataatcatagaattctataattattcattgtgttatagaaaatataattaaaatgtataattttataatttttaatttatgctattactcatatgtcattattctccttacaattttttacaagtcaaaagaagtgtgtgtgtgtgtgtgtgtgtgtgtgtatgtgtgtgtatgtgtgtgtagtgtgtgtttatgtgtgtgtgtgtgtgtgtggcatatacaggtgtctgtgtgtctgtgtatgtgtggtaaatgtatgtaggtgtatgtttgtgtgtctgtgtgtgcttttatgtgtacttgtgtgtgtgtgtgtgtgtgtgtgttttgtatgtctgcatttgtttgtaaatgtgtgtgtgtgtttatgtatatggtgtatgtgtgtaagggtctgtgtgtgtgtgtgtgtgtgtgtgtgtgtaaaagccaaaggttgacattcagtggcttcctcaatcattgtgcatcttgctttttttgagacagggtctcttactaaacctggacctcactggttcagctagaatgactgtccaccaagccccaggaatcctctgtctccacctccctcgtgctgagattataggtgcatgctgtgtaaatttcatacagatgcttgggatacaaattcaagcattttaccaactgcaccacctccatagcctgggaaaataaataagggcctagctttacattttagttttgtgggtctcctttttgttgtcttttgtttgtgacaggagctagtatattatgtctcccttgtctcaaactcacaatcctcctgcctcagcctcccaaatatgtgagccaccacacttggtctttattgcagtgatgttaacagcactttggtggaaggttgaagatggctacattttcattttgcaaaaaaatgtgaaaattatattatcaattacttataaccctggggtacacatatgttaatctggttatttcaaacatgcccagaagaggaacacttgccctattgctcttgcataaaccttcatgtgaatgaacttcgggtacctctataaagggttttcaaatgtgtaaaacaacatccggggaagagagacaacatgagtgaataccattaagaggagaaagagtgatgaaattgaggaatagtcctaaaaacaaatgccagattgtgtccacttagactctgttaagttctattcctgggaaggatgtaaatcacacagccagctatttaaaactgagagcaaagcacacagcccaactataaaaactaaaacttaagatgccgttgacatgaggcattaaacccagccccccacaccagaagtatgctaatgctgtgcatgaatttgaatactcagaaacatcatgaaaatgcttgcttaaaattgactctggatggctcagctctagggaactggaattgctgtttattatctggggtcctctggagaagtgccaatttctcagaatcctagaggaaaatgatgtggagttaattaaagtgtgccaatccagtcatttcccacagggtgtggaactaacgggtcattaggggagcagcaaaggcggggacactagtaagttgttggtaaatccactttccagaagtaatggatacacaatcttaaaaaaaaagggggggcattttgtagcatagatatttactggttctctttgcatggccatcttgtatttaaaaagaaggaaaaaaaagttttgtctgcatgtgagaatcttctagctaaagataacagaacaaaccaagacagtttttcctaaacatagttcagactagaaagtacatctacaccatagcaccctgaattcattcaatctccatattatcttgaaagctaagcagggtcagacctggttagtacttggatgggagaaactaattatcagataggacaaagaaaaaaaagcaactgaagggattttgaccaaagaatggacaagaccttgggtgtgacccccagtactaggacacacacacacacacacacacacacacacacacacacacacacacacacactctaaacaaatattgaacacaacttagcctttctttattttcatagccatatgggttagtaactcaaaaaatacttgctgtgtgttcttggattaaatacacaactatactagaaggatagaaggcatgtttcttgtttgagaactacaaaatgggaagaaaaagtgaaaataaaccatgaggtgcatattttgaattatagccaatgagctcacataacaaagtataaatttttatggctaaactgtatttattcaccctgataagcacaaaatgagcatggatttatgcacctaattttttgttcacatttaatttttattttgattttttaataatacccaacacaacatgtatttcatttctttctttctaactgttttgttgctgcttttatcttatttactgaaagtgagagcgcacatttgtgacctacttctttgtcttctgtaggccgccttaaaattaactaaatttggaacatctaagcaagctaaagggaaagaaaatgagggttcagagtcactcagggaaaaggttgcatcgatagtcatgccctatggtgggtgatcaagcggttatactattacatttcactcttaattacttgtgcttaaggctgaattaaatttgggtgtccccttcttagagcagctcctattggcagaggtgcacgcgctggacgatgtcatggtagtagtctaagatgctctcagtggccacaggatgtacggtaagggtcgcagcagtggtacccgtctctactagcagcgctgaatctcagaaactcatcccggatgaactaggcaacccagggggcaggtaagtcctctccagtttcaggagtcgcatcctcaagaggagcgtggagggcaaactctgtagtcttcaatcctgaatttcccagagaggactttctcagcaagcaggtcttgcttgctggggaagaggatcagagatggtgctcagtcctctgcgatgctcttgcagaggttcagggcctcctgcaggcgaattgtctgttttgtgtcctccccagtagtcatgtggtagctgctgctggccaccatgaagacagcagcaatcaacgaagatgatgtcactgacacacttgctccacttacggcgttcacagcgctggccacccactttgaacaagtggaagttgactttgtccacctggaattgggtctcaaagatcccagaagtcaggatgtggcagagaatcaggtcctggtcacttggcaggtagtcaggctgctggttcacactgagcctgtctgggaagtactgggctcagtcagctggtgctcactggagcgctggtagcaggctcgcactccctcatccacccacggagccttggcgtgctggtagaattcacataggaagtcaaagttctgcacattcagcccagaatgttgtccactcggagcgggttctgagggttggccagctccacagggggcaccacgttgctcatggagaccgcaatggtttcagaggcctccctccgtcgggttgtttttgatgccctgcattaggcggccttctctctatctcctgcacttaagcgaccttctctcaatctccgttaaacctgcaggatcctcatctgcttcacagcagcaggcggtgcgtggccgttaaacctgcttgtctttctgcagttgcttctccatcttttcattgacctcacgcagtgccttctcgatgcactggtgcttggccttactgcctcagaagcgaggccaggctgctgcgtggcagggacaaggcaagggtctcgggcaggcctgaagaacaagaacacaccaggagggtggtggcttgtacgaaggtgagggctcggaggctctccactctgggcagccccgcggtggtcacaacccctcttatgcctcatttgtttgtttgttgcttgttgttgttgtttcaagatagggtttctctgtgtagtcctggctgtcctggaactcgctctgtagaccgggctgaccttgaactcacagggatgggcctgcctctcctcctgagtgttgggactaaagaagtgcaccgccaccacctggcaggtaccttatttttttatgattcgcttaaagaatgaacgaaccatctggataaagaggctggttcaaaaaggcgcaaactggttgacaccacacaggacaagaaaaatgggagtttctaaatttgatttttgttctgagttccgtttccattttcattgtttttctttttaacctgatagaaactgtttgcatctgtacagggtaaagaaatctacatgttaaaatgtgactttatagacttgtggccttctcccatagtgaagaacaaaccaaaaaggaggcaattaaacattctactggagaatgagaccatccttggggaacctgtttactggacactgtctatacacaggaggggtctgcctgcctcgagggcctagaaacatggtaacttccttagcagtaaatgctcagatctcggtttccacacgaaagagaccatggctcctcaagaaacaattcattgcagagcaggcaacagaacatctgtaagaagatgctaaaatatctttttgttctctgtggatgatgaggacatgacagaagggcttgaagggacaaccccttgtaaaaatcgaggccacggggcacatcaaaacaagtaataatgatgatgctttctaaggcttgagcaaagtgaaactctgtccttctaatcacgaaatggctaccagcgaaggaagaagacatcattaaagatttaaaacactaatttatagcaatcattaacagtggttggttcagacaagaaatactaatgaaagccattctgaggcatccaccagagaagaagactgctcagacatgggtttaagacaatagaaagtttttattagccaggtggtgactacactgtgtgttcaggatcccagagtggccccaaacctttctcagggtgagcttttaagcataaaagccatgttctggcttgacatacttcagttaacaagaacagttagccagaagcagaactacagaagccaaagaagcaaggttagtctatttagagactctcccagaactatggactttggtgggttaggtctttgttttagttttggcaggtggtactgtcaatgcactgagttttacagcctgaatggtacttccaccatggagtctgctgtgccaaggtcttgggacctctgttacaaaggctaaaactagtaggtgaaagtttgaggaggaaaagcacatgatgtcaaagtatgtcccaacaagaggttggttatttacaaaagaggaaataattcagtaatggagaaactggcagtccctcccctgcctagataaagaaaactagcatcaccagaaatgaaaaagatcagtgtcctacaaagggcacaccactcctgtgatgttactgccaaaaacaaaacaaaacaaaacaaaacaaaaaccaaaaagtcatatctcagtctcgtgcaaaaaacaaataaacccaaacagaaggcgttgcaccaaccataccctatgttctttaaaaatgccatggtcatgagagacaatataagctgagaaactgctgtggtctaaagaagactgaacgtaacacctgaatgcattccgagtgcctgcattaggccatttaccaggggatgctcccgcagctgtaaaagaaagtaatggatttaaaatataagctacgggttagatggtagctgtgtatcaatgttaagtacccagcccttaatacaccttcaactgtcttaggggtaaactgcctaatgtctgcaagcagttcttgggtgttaagaaacggagacacacacatatgcagataaataatggcgtatatatgtgatatgcatttaatagtaggtaaataaatagatggtagagatacagtaggtagctataggcagtagagcaaggcaaacaacaacaacaaaaagtaagcaattggtaagtctgggcaaatgatatatacaggagggtttggtactattttttccgtaagtttgaaatttactatacaagtctatttttattactataatgaaatgcctgaggctaactttagggaggaagcctttttgggtttgaagttctgaaagtataaggcctaaaggccgcacctcatgcggccttctcttgaaagctcttgtgtacgtgtgtgtatgtgtgtgtgtgtgtgtgtgtgtgtgtgtgtacgtgtacctgtgtgtgtgtgtgtgtgtgtgtgtgtgtgtgtgtgtgtgtgtgtgtgtgtcctcagtttgcacatgcacctcctctcattttaaaccactcccacaaacatgagatcagccctaactacctcacctaatcccaaggactcccacagtcccccctctacacaccattggggatggagttcgccacttgttaaggctttgcagtaccgattacactgcagtgttttcagcctgcaggtcactcacaccacatgcaaagtcctccaagagaaccaaggaaggctgggtcagcctccatcacagcccagggtgggctttggataaacgttctggcagccgccaaaagcaacaatccacaattcccaatcaggaaacaaataagagaccactgccctcccctttgggacactaaatagaaagtgtcagagtggcaaaaggctcccagcacacagggtccaggtgtccatgaaagagggaggaatagcctcaggtcacagcaaagtcacctactgacaccagtggagagagccctggactcctctggtctctgacaccgtaaattacaggattggacagtccaatatgtgttctgatccttggtgctgtgagtctaggactttctgcaggacatatgaggacaaagaaaagggagccagagctccagcagtcagctgcaggtggcccggcatgttctcatgatggaaagaaaatgccctcaaagattaaacctccagggtcaaagcccagacgactgggagaaaagggacggtgctgaaagcatagaatgtgctacaaaggactttagcctaacccggagatctgcgatcctggcgggaggggtcatgattgatgaaaacccagatgcagcaaaaagatacaacccttctaagcataactagaagtcatgagaagtggcctgtgtgatgacaatacaaagcagaatacctggccacatcaccacaggggagggccatgctcctcctgccttcaaggccctggaagctgtctcctgatgagcatagccagaaatagaaatggcaatcctttgataagggggttttcattgttatctttattccacctactggccatccccagcccggaggttctgagaggtcacggacataaagctgtgttgtgaaggctgacatggcccatgtaactgcaaactggaaaacaatattttgcttgaaaccacactctccctcgcaccttcctcctcctggagtatttttcccatccctcttgttatcttctgagtcaagtgagtcagtcccagcacattccagatcaaatgcagtggtcccagatgaaaggaattccactcacggagccgctctcagcacattcctgaacaggagagcaccagccccaggctctgaactcctcatcaaggcccttggagatcctctcccactcggagatgatccacctgagaaacacaacagaggcctggagcccggaaccccagttaaaatggtgccctaaatataagtgatgaaagagggggtggggtgattgtaggggccagaggtggccaataacatcagggaaactgtgttccagacacagcagggcagatacacatatgaacttgtaacagggctcccagaccttagcacaactgactccatggtaaaaataccactcaggctgtaaaactctactcatgtagacagcaccacctgctaaaaatgaaaacaaagacctaatccatcaaagtccatagttctaggaaagtctctaaatggactagccttgcttttggcttctgtagctctgcttctggctaactaactgtttttgttaactgaaatatatcaagccaggacatggtttttgtgcctaaaagctcatcctgagaaaggctcagtgctacactgcgatcctgaacagccagtatagatagatgtaggatggctaataaagatttctattgctttagacccatgtccaagcagtcttctctggagaatacgccaaaacgaactcacagagactatgacaacaacatgcacaagacctgtgcaaatccaaccagagaaaatcccaatatagagagtagaagacggacacaaaggccaccacaaactgaggagcaattgctatttgatagctgctaggagagaagaggtggtcttccttaatgatgatccctgggaggctgaccacaccccaggacaggctctgcccccaagactagctgggcaacatagactggactcgatggggaaagaagaaaaatctcagagttgggtgggaaggatcggagcgggtagtaatgggaggagccgggggagggaggtaaatgtggtcaaatacattgtatgaaattctcaaagaattaataaaatattgctaagatgttctttaaacaagtgataagtgatcaggcctctacacatcctgttatggatgagggctgactgcacaaggtcccaccctgagggtctacaggcaatcagaggttgatgggagagaaagagacaccttttcttcagtggcatagcccctgctaagatgcccatgtgccactaagtaagctttcacccttgcctctgttggtgacactaattatattcctttgttttcccccaaaagaggggggaatattttgaaagaaggaaaactaattgggaagaaggggatcctcagtgtgggaagagaccagagaaggtcaataggactaatactaaaatacattatatacaagcatgatgttgtcacggagcataatgaacatatgcaaattgaggcctttaacacagaaaataacacaatgtagagggagacagtggggagtgatgaccctggccctgccagacatcagaggctgatggactcattcatcgttaagccacctgaagcagtgcaccccaaaggtgcagcagtgcaccccagaggtgcagctagaccccagtgtcactccaacatcccacaaagaatctggcttccactgtcttcactgggggacttgttcaaagccatgccctgagtggtgagcctgaaaacctgtccccagagaacagggaaagccctcgttcagccttcaagctctgtaaaacacccttcctggtgttttcctttcgtgtggcttctgtaccagtggagggtctcaagaggtgacaggcccggatccatatcactggagtgaatttagagttcctcctgcatgccggagaagtccatgtagttgcccttctcagggcttagaagctgactgcactcctaggcttgggatctcttcctcacacagcctcacagccttgctcctgctgcccctcagttcccactcagacctcctgctcaatcataaggacctctgtaatgacactgggccctcctggacagtcaaggagtccctccccatctcaagatccataacatcacgtcttcaaagtctcttttaccctgcaaagtagcacagtgagtgcaggttctgaagattaaggtgtggtcattctcagaaagctgttactcagcctgccacagccaccaagccgcagccagtgggaacaaacaaaagcaaagtgttgttagggacagattccatctgtgcatgttataaagtcgagttgatagatgacaatagataaatgatggatagataggtaggtagatagaagatagataaataggtagatagatagacagacagacagacagacagatagatagatagatagattataactaggtagataataggtaaataaatagaaagatagatgcatagtagatgatggatctattatgacagataattggtaaaaatgtgaataataaacagatatcacatacatatatgtgatatatgtatgtgatataagtaccagattccggagggctttggtatcaggatcttggtaaatacatcagtatattcccctggttttaagagatttccattcgcattgctcaattaaatgttttttcctcgaaatggcactactgtattttgccacaaggtggagccaatgaaacatcagagaggctttcacagcgccattttgccctcgctttctgacctgctgtgtgtgacgtcacccaccattgtttcctgtgtactttgggcataaagattatttggttttgttcaggaaatctcagtgagccttacagttttctgtactcaaagaaatcacccagccccaagagtgaagagaggtgtcctctcctgagagctgccggcatgatggagagcattgtgagccagcataagctgggagaagctgcggagcgtcactgacatcaaggaaaccaagtgctgcccaggtctgtggaggaggcctgggatgtgggggatcgctcctgaccagggctttgttcccagggatgcctgtgacagcatcgattgtgatctctcatgcacagtccttccctccggcaacagtcacaggtcaacacacacacacacacacacacacacacacacacacacacacacacacacacacaacacacacacacacacacacacacacacacacacacacacaaacacacacacaaacacacacacacacacacacaaacacacacacacacacacacaaacacacacacacacacacaaacacacacacaaacacacacacacacacacacacttcccttctgtggcctgataccatctggcttctgtgtgcctcccaggctcacttctggcctcccccaggccctgaacaaagattctttgcttgaccaaacttaagtcaggctcctggaccttctgagcatgactcataaaatctacttttaacaaagaactctgataagtcaccttctcaagaatgtgcccatcctcaggctggaggtggtaaaggggcttgctgccatccctgacaatgtcagttcaagccccagaacatggtggaagagaacggactccttcaacttgtcctgtgacctacacacacacacacacacacacacacacacacacacacagagagagagagagagagagagagagagagagacagagacagagacagagagacacagagagagacagaaagatagatagatagatagatagatagatagatagatagatagatagatgaaagaatccctccatctccactctgtttagcattactgtcctagggtccctgaccctccactaactaacctttgagtgacatctgaccacctgacttggcttcaccaaaaatactgttaggtggctatgctggctagttttgattatcaacttgattgaattaagaaccacgcagagcagtagtgaggcatatctttggctgtgccctactagagtagggagcacctaccctaatgtaggtaacaccatcttgtggctggagcttgggctgaacaaaaaaggaaaaaggagagagcccactgagcaccagtcttgcctgtcctctgcctcctgacctgcccagatctgaggtgtgccggccacagtctgccatgcctgcccacaatgataggctacggcaccctctcaaaccatgagccaaacaaacccatcctcccacagcttgcttttttgccagggacttcgtctcagtgatgacaagggtcactgagctacaaatcactgggttaagccaaccccctcaccctgaggcttccacttactgacccagccttgctcctaggcttacttcctggtggtcactagcttccttgcccccaaatcccattgctgtggtccctttacctgttgtgaccgtccggaataatcttcctatcatatttaaacatgccattgaatcttttgttttctttaaaacccccattgctacattaccatggctacccgaggcatcccacccacacagtattctcaagaggctagggttcacctggcttccaagatcttctagttggctcccaaaaatgccctcagggaagtggggagaagctgggccagtgtgagtgggcagtctggtccctatgctcacacttccatatcagccaaaactcacagttgaggggtgagctgagttacagagagtacaaaaaggagacaataggaatgattgcagggcctttgtcctaggccattctccctatagataagcattgtaccctagggggcggggcttcttttgtaaagaaggatggtacatcatgccctgtttcaaactcaggatgtagggacaacagcaccccagcccagccaacatagtgacaccaacaatctttgcctcagggaaagagctatgtctctagcttccatgcagtaaaccatagttaattgttttacttcttactcttaggggcccaccacctgactcctgaacaaatacatggagatgtattcttacttataaatgcccagccttagcctggcttacttctagccagctttttaaaaattatcccatatgccttttgcctctgggcttttacttttttctgtttctatataccttgctttacttcttactctgtggcttgctgtgtagctgggtgacggggtcgctgggtggctgagtagctgggtggctgggtgactgggtggctgggtggctgggtgactgggtggctgggtgactgggtgactgggtgactgggtggctggcccctggagtcttcttctcctttgctccctgatctttcttccaagatttttccttctatttattctctctgcctgccagctctacctattctctctcctgtctagccactggcggttcagctctttattaaaccaatcaggtattttagacaggcaaagtaacacagcctcacagagttaaacaaatacaacataaaagaatgcaacacatctttgcatcattaaactgatgtttcacggcataaacaaatgtaatatatcctaaaatggtattccacaacgataagctttacaaagcatatgccaaacgtcaggcagtctgccaagtccacggaagcccacaaggacacacccacaagaaggacacacactcctatcttatcatatcataatgcaataaagccaaagtcaatggcaagagtcattagagaaactaaacagcaatgtgagagcaagcgcacacctttgaacaatcaatgagccattgaagaaatcaatggagacaattttaaattctctagaatcaaatgaaaatgaaaactcagtatataactttgaacatagaaaaaaggaaatgtgtagataattatcaatgtctatattaaacaatcagagaaaatgacttctaggtaagatggcaggctagaagctacctctgtgtggcctggcaaaagagaggtgccagaataagaaaaaaaaatagaaacagaggaaggaagagttcggagatccacaaaacaagtgataagacagctggaaagtacagaaaaacggaaggtggcgtgctgaagagaagacagccaagctgaacactcttccagttctggggctggggcaaggagtgagggagaaggtggatagaaagacccttctagaccatcatgatagtcctacccatatggcaatcctgcccacaagagcagtccacagccctcacaagcctcaaatcccattgggagtcttgctgaagtagtgatttctcctgtggaaggagtcagccatctgggaagttggcctggctcggaggactacggctgggtgccatcctgcttgactagagtttaagagtgggtacccttgaggcttgaggacagggagcagtcccaagtctgggggccctaattcaaactaccacagctgcagagtgagaagacagccctggacagtcctcctagctgtggagagtgggaaggacagctatacagtgcaagcagcagcaggcatggctcagccagtcaagtgcatagggaaggtggttcctctcttggtggctgcgagctcacaccattggctgagaataattccagagcttgacagccccgagccagggatcagcagagcccactgacttctggagccagcgctatgctgtgaggttcctgctgtcatcagataactctgaggccccagcagagcactcagcatctacagctgcgtctttccggcagggcgggcgatggatacttggggctttgaaagtgtggagacaggctctcccatgagagtcctccactctcaatgcacttggaagactctgctagaacatcacccacaccagggggtacaaactgggaagagtggaagaaccagtttggcacaccaactataaagccaagagtggctagccagtagaaaagcactatgtatacaaagaagggagctactgacgtcaagatagctcaggcaaacaatgggctcatcacaggttcagctcagcatggcacgcaatatgccatttggaattcccactttgtacattcattggtgcagtcttttagaagtgttctgtgcttatcttactggggttttgtttcatatttccccttcttatatttattcttagtgacttttctatttctgggaagagacaccataaccaaggcaccttacagaagactttattggggctcacagtctctgagggttggcatccatgaccatcatggcagctagcaggcatggtgttaaagcagtggccaagaactgacatccttatccaaaagtaggaagcaattaggaccatacactatgaccaagctggcttcatcccaaggatgcaagaatgattcaataaatgcaataaaacacataaacagacttaagggcatagaacacatgaccatcccaatatatgcagaaaaggacggtgatgaagttccctatctgtatgggttacttctgtggctgatatcaaattcctgataaaagcaacataaagaagaaagggtttatctgcatgcagagctcaaggatacctcacagctgggaaagcctggcaacaagagcatgcattggtgctccattgtgggaattatatccaacagccaattgtgttggagcagcttggcccaatgggcatggtcttctctgagggggtttgtgacccaaataccctgaataaaaggtcagggcagagcaggaagaaggatgctctcttagactgtggagggctcactggtggcagcagcttagtgaccttccccggacctccccggtcgtccttgggaatgagagggtccttgttctgtattgtgagtgtactttatattctgtgcctgtgtaataaacctgacttaatcacagaaatgcctccctcattagtactgagcttactttctcctttttattcatccttagacaccaacctgtgggatagtgtcatccagactcaagataggttctccattctcagttaaccctttctggaaacaccctcatagatatacccagaaatgtgtttccatggtgatctaaagaatggtcttttgagtgtcacgttgtctacaaattggtaatttgacttcttcctttcctacttgaatctctttttatctttttctcttttcttaccactgtagttaagacagtataagaacacagaatggaaacttagtctcattctgatttataagtttttcctcctttaacatgacattggctataagtttgctgtgcatatggcctttcttatgtccctcaagactcttagcatgaagaggtgctagaatggttaatcctgactgtcaactgttgggattgagatcacctgacctttgacaattataccaagagagtaagttggagaaaagacagtctcttcgaaaatgtgggaactggatacccactgtggagtaataaaactatctcccaccctgtacaaaaataaattcaaaatagatcaaagtccttaatacaggaggtgaaaatttgaaaccgtgggtaaggaatgtttgaaggttcaggcacaagcaaagattttctaaggactctaatagctcaggaagagatagcaagaattggcaaatggggttgaatcaatttaaagtgattttgcacagcaaaggaaccaattaactgagcaaagagaacctaaaagtgtgggagacaatttttgccagctatacatctgacagagaattaatatccagaatctacaagaaacaccaaaaattaaatacaaaatccaatcagtaaatggacaaattaaatgaacagacagtccctgaggatgaagcaaaagacaaggcatatattggcatccttagccatcagggaaatttacacagactccatctcactgtagtcagaatggctatcatcaagaaaagcaccaatagattctgaccagaatacgggtgaaggggcactataggctactgtaggaatgtaagttagtgaatccattatgaaaatcagtttagaggtacctcataaaacagaactactatatcagctatgtaaaccaagccaaggagtctaaattaacttccaatgaagacctgcataccatgtaccattgcacgattcacaacagccaggccgtgagggtggcctaggagtcagttcagccatcagtagatgaatgggcaaagaaaatgtgctgcctttacacagcagagctgtatccagccacaaagaatgaaattgtattgttttcaggtaaatgatggagccaaagatcaccgtggtgggcaaaacaagcgtctccctctccctctcctctctctctctctctctctctctctctctctctctctctctctctcgctctctctctctccctccctccctctccctctccttctctctcccccctctctctatgtatctctctctctctctctctctctctctctctctctctctctctcacacacacacacacacacacacacacacacacacattttctccgatccgtgctcctcctctggcgtgccaggatgacagaaaggtaccaccacactcagtttcagaatcagaagttgaaaataatagcaacatatgaatgtaccagggtccaggtccaagaatggggacaaggggaagagaagggaggaaaggacataagggcgggggggggggggtcctttatgtgaatatttgagaatgtcacgtcacaatgaaaccgattgctttgtacacctaatacatgctagtaattaattccaagagagagaggagaggaacccacagtctagtgaacagttaggcaggtatttgtggcaccagggacaagtattctcacagaagtcatgtaataggagctgagggggctggagcggtgtcttggtagttaagagcgctaactgtgcatgacttctgtacaagatgaggactggacttcctactcccaacacccacctaaaatctgggcgtggccctgcacacaccggtaactgcagcattgagctgggtagagacagaagaatagaaggggtttgctggctgactgcctagctgacgatgtgacggagtcccagtcctcaaggcagaggatggtagagagggacacccagtgccccgctccggcccctgtgagaggcgcatgcagccctccacatacacaaataaaaataatacaacaatgaatagaattaaattttaaagtaccaagagaacagcttcactcatccgcaactgtgtcttctggcttatagcgcccacatctcaggagacacaagtcacactcctaatgtgacttgcatttcaattagtcccaagtctattcggggcactcccttcgggatatgagtcagcaggcggaggcctccccacagaacctgctcaggacagagtggctgctcttcagttcattccgactagactaggcacagccgaaggagcagaggcagaatgagcttcctcgggggattctagaagccccagacccggcccggccctggccctggcaccaagcactcctagcaccaagggctgggcctccgctgggctgtcagccttcactactcggacccctgctgctcagccacagatactagactaggtgcatgggagggaaggtccttgctctcccctcagagcctcggcttttgtgaatattgaggaatttgggttgtgagtcagaagctgtgggggacacatatctgagcgtgactcagccccaggctcagctcggaggttcctcccagaatatgcccttttttggccccagccggggtttccctcctctctccttaggtgctcatgggcagagcttggaccggcctcagataagcgctacaactctgaggctcgctccccacgagggctgggtgcaaggaatgtctctccgggacttcagatcggggggggggggggatggagggaggggcaccagttaacctgctctaggtgtgcctgagaacccacgctaatgttctaatgaacgcacaacccaagcccgtagaaaactctccttcttgggtgtataaaggaaaaaaggaagggggggaagaaaaggaggggcaagagggaggggcaaaagggaggggaccggaagagaggaagtctcctccagctgaagcacgctggttattttaccccagatcctaggtgtattcactagtggtccctgggatgggaagttaaaagcacactccgggtaggttttgaggcagacagggcagaatgccctacacaaagacacaagcagggggagagggcagctgtgtccgggacagcggcggggaaggggggcagggaggtgatgtggagagaagagagaaagaagagttggctaggggacggggtgacctaacactagtcagggtgttaggcttccagagtgtcaggaagccacagaagcgaagtgaccagtgtcagccagccctgcagtctgcagtgtgctgtgacagtgcaccgtccctcagtcctctacatccaggacctgaattcccagctgcagtcccgtcttcacatccagagccacaactccccagctgcagggtcctggggaagtaactggatctctagatacctccgttttctcaactgtaaatgtggcaaggatggctcagtgggctgcggtgagcagctggtgaataaatatgcggcaaacatttgaaaaggagagatgggctccccagccggctccagccagtgatagcacacagaggtttggactgaccatttctaccggggaagagctccacccagctggctttattctggagtctccatctgggagctacgctgtactctaggggtccttcagccccacagtttttcttccctcttcattgctcttgtaaggtcttcctggccgtctgaaggctttgtctcctgctctctatattttcacagttggtacccccaaagcctcttgcatcttttgttgcgtgtcttctgagacattgtcttactctataccccacgctggcctcaaacccgtagcaacccccagtgcctcagactcccaggagttgagattacaggtgtgaatcaccaagccctgctctcttggacctctgttccagtttgctttctgttgctgtgatacaaagcataaccagaaggcaattgaaggaagtaaatgtctaatgggcttagaggttacagttcatcatggagggaagccaaggtaggaactcaaggcaggaacttgaagcagaagccaaggaggaaattgcttcctagcttgttccctctggctttctcagccacctttcttaaacagcgcagggcaacttgcctaggaatgacaactgctcatagtgggccgggccctcctacatcaattagcaatcaagaaaatggcatgcccacctgatagaggcaattcttcagcctcggtgtgtcaagctgacaatgaagatcgcgtatcacaacttctaactttgtgtgtgaggggttgttggtttttgttttgttttttacagaggataatttgctttctagaggacacgaattagtgcactcagttaaacgtaattctttgctattggactggtcagagtgttagtattcaggcacctgtcttggcctgcccttgaggttcagacaggatacacctcagctgcagccactaagagcaccactgcgcctattcactgtttcctttaaaaaaggccctgcccaccttccatcctaccccacccctctctccctctcccatctctctctctctctctctctctctctctctctctctctctctctctctctctctgcccctttcctctctccagcccccctcccctttcccctttttatgatccttttcccaaaaacaaaaacaaaaaacaaaaaaagccaaacctctgcttggaccctgatgaacagcatctttctcttcttgtgctgcttttcttaaattacaacacagagtccttaacataccaacatcattatggctcatcaagaggcaaattgagccagggttggtggcgtgcacctttaatcccagcactcgggaggcagaggcaggtggatctctgtgagttcgaggccagcctggtctccagagcgagtgccaggataggctccaaagctacacagagaaaccctgtctcgaaaaaaaaaaaaaaaggcaaattgaatgtgaagcgttttccaaaatctcttggccatgaaagaaaattacagaaccacacacacacacacaacccaccctctcatgacacttcgcttgctccacagtcaagacgaaaaccactgaactagaccacctctgcagttccatccaacaacatttgtgttgcaactcctcacctgtgaaacatcccggatgagcatgccacagccagggctgaattctgcagccaggaagcccaagccctcctttgctttgcgccagcaaccggagctatatccaaaagcctcgtccacctgagagttgctgagcactttgtcagtactgtggatgtcatggtccctctttcacagacagagaaaccaaggcttaagaaattaaagactcagatccatagtcaagcaaattcttagtgtggtcactgagtcattctctgtttgacagaccagtggacaccaaagggcctgttgatggggactgagggccagaccggtatttggaaccaaagctctggaataaatgaggccacagcagtgacgctacaccaccgaggcaggccaacaacagcaagaaaataacacctgacccccaatcgaccgcagcaggaagcagaggaagcacataaaccaagtctcagctatcataaagcaggtactccagaaagcaggcgaaatgggattgctgtggcttggatgtcttttcaaagatttattcatcttattttatgtatgtctcttgcctgcatgtgtggatgtgtaccacatgcatgcttggtacctgcaggggtcagaagaaggcattggatccctgaaaccggaattgtggatggttgcagggcatcacatgggctctgggaaccaagcccaggtcctctgcaagagcagcaagtgctcttaaccttcaagccatctctccagcctttgatctggattttaaatgcctgtcaaaggcctgtaggctaaaaggctgatgccagcctgcagcactattagaagatactggaacctttaggagatggggcccagtgggtggaaatgtgatgaggttgtttgactgagaaccatcctgtattagtcagtgtattgctgggaagagatgccacgaccatagcaactcttataaaagcaagcatttaatcggggcttgctaagattcagaggtttagtctgttatcatcatggcaggacgtaggcagacatgatactggagaggtagctgagagttctgcatccagaccaacaggcagtgggaagagagagacgctgggcctagcttgagcatttgaaacccccaaagcctattgcgagtgacacacttcctccaataaggccatacctcctaatccttgcctgtcaagtaggagcactccctaatgaccaagcatctaaatatggggcccctgtggaggccattcctgttcaaaccaccactactccctgtatgaccacatatttggacgtgtggtccccattggtggcaccatttgcgggggttaggagttttgctatcgatagtttgtctctgggggtcaagctgttgttcatagcctcaccctacttccagttttgcaattgaagatgtaatgtctccatttcctgctcttgctgtcatgtttgccaccttgctgccatgcccccccccgccccaccaagagggactctatccctctgtaacaggaagccgaaataaactcttccttctataagttgactctgtcatggtgttttatcaaagcagcagagaagtaactagtatatttggttactgggagcatgaaccttaaagcactattgaaactccagcctctcctgcctctctttctctccttgcttcctggagaccatggggtgaatagacagccctgccacatacccctgctatgatgtaatataccagcatcagctccaacccacaggactaggtgaaaccatgagccaaaaatgaacttccttctttatgctggttatcttagatgctttgtcagaggggcagaaagctgattcacaaagttcagtggttggctctcccggccccttcctgtccctttactattccagcatcctggcccctaagccccttatctgcaacccccatatgctccctccaatacatccactgaatgattaatggctgacaggcttcctgcctcaggaccaacatcatcagcatcccctccactagctcggtgtctgacaccacaatggctatgcagtatttccagtgtgactccctggcaatgaacccagtcacccactgactgagaaaaggaatggaattgaataaaggaaaaagtgaagaggccaggtggacccacgctctggcagctgtggcccccagatcataactgaacaagcccagtgtgatacttcaccttcattgttgacttgaatggatttggaaacaactcaattctagatgtgtctgagggtgtttccagaaagacgtcactgagaaaggaggacccaccctggatgtgtgtggctccttctgatgggctggtgtcccaaagtgaataacagaaaagcaagaggcctagctgggcaccagaattcacatctgcctactgatacctcatgttccccctgccgtgatgggcaatatccctcaaactggaactaaaatagaccgagttgctttcgtcacaacagaaaaaaaaaaaaaaagtaactcagcaccaatatacccagggacgctaacaacgacgatggctcctagaatcaccggggaaatgctacagctatggttggtgtgtgggagaaattacaccatcgagcctgcacactcaggggccaaataactgagtgccacattggctacttgccatgtgaacttgagcatatatctgggaagttctggaatttctacttgggagggacttgaaaattgaaaatatgcagatggtaggtggggttgcaagagctagtcttgaggcttgccttggagctatttttgcttagtaagcaacttgctctggctaaaaacattgattttgaggacttgggggataccactgatggaaactgcagggccacacctttctggtaccctgtggtgctttcccttcatcagccactgagaagacagatgatcagttacagccactggggcactcaggtgccctcacatggaggtgccgctgctgctgctgctgctgctgttggcaatgatgtgacaacaatggtgataatggtggcaatgaccctgaggtcctggtgttacccccaaacagtttcacagaccttgtaagctgatacatgcaacaattctgacatagggccccacttgggaagatgccctaatttgcttctctcttgctttgacagaatgccagctaaacaaaactcgtgggagaaaaaggtttatttccccctgcaggttacagtccatcatggaagcaagtcagggcaggagctccaggccggaaccaagaggcaagctgaagcagaaaccccagaggagcactgcgtactggcttgcttctagctaggttcacattcagctaccttacttatacagccctaagcccacctgtctgggggtagtactggccacagtgggacaagcccttctccatcaattagccatcaaatgcacccccagacatgcctaggagccaacctaatggaagtcattccagccacccagttgtctctagcttgtgtcgagttgtcaaaaatcatctggcataggagataagaagatgggggtgctggtattttgaaaatctcaagggatcacacaaatgaaaacataatttatccttggctaatctgccatttggagaaacccctatgaaaggccctgttagggagagtctggtgtgcctgaggtgtgttatccttggtcctatgtgcaggctggagacacagacaaatgttcagaaagcatctgggcctttagaacttctgacctttcttcaagctgtttcctctccccttccagtcccagcactccaaattttgtgagattaaagagatgcctgtccagtctcctcttcaggtctcagccaccctccagaagccccctctgcctcatgccatactctgcagtcccgaggaaaaagtaaatcttataatctctatggtaatattttgtttgtgctctaacaaataaagcttgcttggggatcagagttcagagctagccactggttaaccatagaggccaggcagtgatgacacacacctttaccccagcacttggaatctcatgcctttgatctcagtacttgggaggcacatgcctttaatcccaaacctagggaggaaaaggtagtgatatagttgggtggaaaaagaaatacaagatgggcacagacagaactagccccctttccatctaaggatttcgtagaagtaagaactctagtggctggctaccctgcttctctgatcttttagctttcacccccaatatctgactccaggtttttattattaagaccaattagaacttgtgttacaaatctctccagaggagaggaagtcatactgtgtgttacaaagctttctgtagctgcaatgcaaacactaggagaatagattaaaggcaagaatttctcacttgagctcagagtttcggggacttcagtctgtgcttggatggtcctattattttagggctgagagggcgctgaacaccatggaggcaggagcctgtaggtgagaaggctgttcacttcactgtagacaggaagcgagcagagaggtcctcaaggccctgtgtacctcaaaggctactttccagggacttcttccccaccgagccctgcctgcttaagtttctaccatttctcaaagtaatgccaacagctggggaccaagcattcaatgcccaagccttgttgggggacattaatgttcagacaaaactgggttgtgtgtttttgcctcctgcacactgagaatggggatggaagctggcctggtgcaccagacaagtgctcgaccactcaactacagctccgagtgtgttttagtaactctggaactcatgttgtctgtggtctgctttggagtcatatgactggcctcaaacatggaaaagaaagaggaaatcatagttttccctccgctagacctaccttgtcctctgctgactgaagccaggaagggaggccctgggactgtggtctagggtttcagagtgaggctcacttcaccacgtcagctgttgccatatccctcctaaaataaggagtgaggatttcctgtgggcactgtgaagtctgtgagcccaacagagaactgcagcgtgcacacacacacacacacacacacacacacacacaaagtctccactttctccctctccgtcttgctcatattccagatatgacagctgtttctgattgactggctatccttctgggctgggtgactcatttgggaggaggggatctgtgtgtgcctttgtgtttccctgacaggggtcatgtttccctgaagagaagacttggccagcttccctgataaaacatggtgaggaagctttgaagcataaagagcagcgttgacttagggcctgtatccaaatggtgaggtcagtctatgtgtttccaaatcaagtgcagtagctttggacagtctgggaccgctggggagaagagatctctgcacacagttggctaggcctgctgccctgcctggatggaccataagggtgttcactaaaccggaagaggaaactcatcctgctgcctcagccttgcaaagccttgcaagtttctgactcgattgcagggatgggcataatctgcccaagcatttgttgctaaaaggattgggaaggggggctggcttcccgatgccagggaggaggcacttcctcccgctggtaaccaaacttccactctagcagatttgagacaatatttcccccaagagccctgagccctgaaaaaatcagggtgtgggccatagaaatcagtccgtgagaaaattaacatattctaggaaaggactgtgaagcttcagatatcattgctcaggaaacccctgaactacaaatgactgctgtggagcccccagctctttcagtggcacagagccagtgtgtgacaagcagtgtgcctgtcaggcgatgtgcccagagttgaaacataaggacggggatgttaaataaagtcaaacttagaaagagagagatgtcattggaaagaaagactggtcatgggcagaatggtcccatgtcaggactctgcaaccacctcagattcaaacagaagaacgagggggaggagcttgtctttctgtggcagaagagagacaaacagagccagacagactgtgggagagaacctggacaaacacctgaagtgcataggccaagcaagggaaagttctggctggcatcagcccaatcccagaagctggtgaagatgggctgggggtgctctgacctgggggaagccgagctggagaaccagtaaggaaagctggaaccctgagcaaatgcagcagaggatcagccatgggcaacagtggacacccagttaaagacaagaatggacaccgtgaggaggctaatattgctatgtatagttcttaaagctaaaattattgctagcgtactaaaatgaacacatttcaaaagattttatttgacaaatataggtggagcaaccagacatgacgttttgtttgtggtttttttttttttttttttggttttgtttttgtttttttagacagggcctggaactcactttgcagaccaggctgacctgggaactcgggtgacctcacagagatctgctgccctgcttccccagtggtgggatttaaatgtgtgtgtcaccatgctcagcaccaggcttgtgtttccagctcgatggtatctggaagcttcaaggcactttcccagacactgttaattttttcccactgtctgatttccattggcctcaccctgatttcttctgggctcaagattcaaaagagaagttgaagacactagacacacctcatgcacaggagagaatagtgagccacagtgcaaacagataaactctgacattgcaacagggaaaaaagacgctttgattcctccgagaacagggtcatttgcatatcacatagatatttcaagttgctacagttacctacaacttccatagttacaaactaactcagaaacaatgctggaccatgataacctggagggaagttccaaaccgtggttcctgagtccggttgggagagaggcatttcagactgcattgtttttgctcttctctctgtaaagcgctgtcctagacccactaaccctgaggcagcatccttggcttccactcagtagaggccgggagcactcacctcccagaaggtctgcagttatggtcagaagccgcttgggtcacgtgggtgggtgggtggggttgcctccggttgagaacccctgctttaaaccattcagagcacaggcagatatactaagccctcccagtatttattctggaatcacattctctgtatgtgagctgcaactcagctgcaccagtcaccaacaagggctctattctaaatgctctcccagcattaactcaataaaccctcacaggtaaatcagaattttagatacacatcacatagtttattctagtgtaagtttgcctcgggtgatatttgagggctacgcatactgaaactacacatttcccccctttacttgaaattcagatttaacccggatagctagttttttgccaaattgcacaaccctacttgtgcacaaataactgtacggtaaccgcagaggccccggagccttagaatccctgctctgcctgtgactagctttaactcatggtattacatcattgagcttctacgggactcagtatctcatctgtacgatgggtacgctggcagccacttctacagaattgcgggtgttgctgtgtccagagcctgcagaactgttaggatccaggaccggtgggtggcaactgggttagtctctgcgctcacagtgctactgactcatccgatgcttcgcagtcattgctgagtcgccctcccttcctggctggggtttgagtctcaacttttccacgcgaacttgtgagcgtcgtccggtccgccccccgccccgctacccggccgcgccatcccgggaagcgtccgaaggtggcagcagcggccccgcagtcaggcctccagcgtcaggctggcgctgtgcaggtcgccggctgtccgcgtccggggccaggcgacgagcaggccgggagaggcggaggccacaccccgcggcccaggcgcttcccgccggtgaatcatcgcctgcagcagcggctcccgcagtccgctgcagcgccccgggcccggccgcaccccagccgagtgcagcgccccgcgtctccgcgagccctctccctgtgccgtgagccagcccgattggtaccatggcgggcatcgcaatcaaactggccaaggaccgcgaggcggccgagggcctggggtcgcacgagagagccgtcaagtacctcaaccaggactacgagacgctgcggaacgagtgcctggaggccggggcgctcttccaggatccttccttccccgccctgccgtcctctctgggcttcaaggagttggggccctactccagcaaaactcggggcatcgaatggaagcggcccacggtaggaagctcggggaccgggcggggccgggaggggctgcagtggaagactgcgagccaagaccccgggctcccgggctcggcggtgctggctcggtaatgctggctcggttgtgctccgcgattgctgctgaggagactcctgatgcaggctgcggcccacccagtggacctgcccttagctggcccagagtgtttcgcaggacaggaccccaaattctactaacgggcacgccctggaggccgcctttggtttcacaaagcctcagggacacagggccgctgggatgaaacttttattggactctagtgatcttaaccactacagcaggggacctgggtgtgctgcggtggcaggggtggggtgtccgagcagggtagaagactctggactgcgtcggggaggcaagggtgggcacagcctggcgctggcttacataggtggctacaagcatctgtgatggttgggtttatccagcttgcatcttgtttatttctcaaagtgtaactagcgggacccacccctcatatttccccggacaacttaacaaagaactaaaaggctccatccaaagatcttgatactcattttgttggcctagagcccccactgggaacctctgtcccactcccaaacgctcttgtgccaaccctcagggtctctgtccttaagccctcccagcccttgtggtttcagtctccagtgggaacgctgctgccctcatcccatgggaccctcacttgactttcccagggagcctagaggaaatctagagccctgtttaggacattgggcattcatgccctacatccatattcttgatcttcacaggctatttttgctaccctgaatccagctccaggtctagaaagtaccctaggccagctaggtactcaacagccctgggttctaccccaagcaccacataaaatcaggtgcatggtaatgtatgcctataatcccagcacttaggaggtggagacaggaggatcagaagttcaaagctggggaccactgagatggctcagtgattaagagcattggctgctaagcttaacaaccttcagtctatcccagaacccatgtggaaagagagaaccaactccccaaaactgacctccatatgcacactgtagcacacatatgaattcttgcaggcatacacacacacacacacacacacacacacacacacacacacacacacacacaaaataaatgggttaataataataacaacaacaataataaacaaaaggtcaaagccagccttggctatacagtgttcgaggccagcctggaccacatgagaacttggctcaagttaaaaaataaataaaaaagtaaaccagaaaagtctctgtagagcaggatcctgtgcacctgggtgcattggatgagtcacagttcctcacttcagctgggcgtggcagtacaaccttggtcccagccctcgggacactccacggctttggctgcttagtaaattcaaggcgaatctgaactacaaagtaagactgtctcagattaaatgaatatgataagaccgatacaagcaaggcctctgtttcctcccttgtccagcacactcggggcagctgccacagctgcttccatttcccagagacacccggttttctcttgcccttctcacctgccaggcatgctctcctccaacccaaagtgtagcccatttacattctttgggactttgtcacaagcctcctccccaaagagtctttcctggccattctgagcagactttcccatcctgttgttctctgccctgtgctaatttctgccccggcattctcaccatttaatcaacatatgttttcttgttctgctgagctggtgtgtgttctttgtccttgtgctctcagagtctcaccaaaggactgtcctttctcgatagtcactcatgcatccactcatcagtatttataaagtgcttattctaggccaggcatcgagatgcccatgaacaatcacaacaaaacaaacaaacaaaaacaaagtcactgactatttggaaaatgaatgaatgaacaatcattgtgagcttgaatgacatcctggctggtgatgtgattcacaagcaggagagcatatgccttacatttgaacatggttttactacttactctctaccctagtttcatttctgtggctatgagaaaactccctgatcaaaagcaacagaagggatgaaagggttcattcggcttacaattccaggttccagcacatcattgttggaaagtcagagcaggaactccagcagctagtcacatgacttccacagtctagagcagagacgatcaaatgccacgtgttgcttgcttgtatctacctttcgtctgtcctgcataggctcccctgcctagagaatggcaccacccacaatgggctaggtcttcctacaccaattagcaatcaagataatccctcataaagggaaccacaggccaaccagatctggataattctttgaaccgactcttttctgcatgactccaggctgagacaagttgtcatttaaaaaaaaaaaaagaaaaccctccacacacacaacctttccttcaaccttccattcagtcagggagcacttattgagtgtctattatattccaggacagtatgcttagtttctgtctctgaagagaagacaagaggacaggtgatagtgcctgtggccttccgggtaggaaatagagatctagagccgcctcagggacactgcctagggcaggccagccatgtaccacatgatcattctacagttggggaaactgaagcttgggaatgtcaaacctgctcagaacaaaacaggagtggagccagggctgggatagctgctctctgtcccaacctgactgtcagaccctggtggggacaggcaatgggacttaaaaaaaatgtacccactggattcattagccagtcattggagattggaaaagagcaatgccagtggatggtgtgggttagaaccaggcaggctgcagaccctagagtaagaggagtggaagtgaagtgtgagtttcaatcatttagaaggatgggtagatgacaggaagaggagagagagagagagagagagagagagagagagagagagagagagagaatgcaaacacccatggcttgattgatttaagagattgttcagccatgggcaacttgagtttgttagaggttgagtcacgagaggaagggattaaagatgacttcaagagaaagaatgaaacaacccatgaggaagagaaagcagggcagggcaagagagctggttagccatcttggaagggggggtgttttgctaactcttccttagagggagtcacagcactggcaagaaagggcttcaatgcaagaggggtgagagaacatgaccacaaccacactgagggcaggggacagtgccaggccacagccagaactgccatggcatcacccaaggctggcacatcaggcccttccagctgtcctttatagagttcttggcaaggccattaatgttcatctcatctgaccctgaggacagtctctgtgagtggtacatttgtcttcaaacccatctaacagatgcagatcaagctgcagggtgcccagtacccaccagcatcctagcacctatgcattaaatggcagcaccaagattctcacagctagtgagaatccaaggcccaagccttcccctcctttcttctaccgctacaaggctgtgtcagtgtttaattccaggctccgcaggctgtgagcagggctcagttttctcaagtgtctctgggctgcgaagtttgaactttggcttctctggagactctgaggcagtttctgaagtgtaatggcagcccccccgccccgcccccgaggtgagcgcgtggatgatcagtgtgattaaggggctccagggactgagctcagtctacaccacctccaggataagtgcttgcctggcatcccttaggaaaagttggcttccctgcttgggcagaagtgctttctcgctatcccttcatcctccaggcagactgatggggaagcaggaagcgagcatgctctgtgagctggtgtggtgccgaggctgccaggatggctcaagcaccagctctcacccagggaagacccctgtagacagaagtgtgccaagggacaaggccactctctgcaaatgtagcactcctacaaaccaacatccaaagcagctcagatttgggccctgacttcctttgtggcttttggctggagctcttcgggggactgctggagggctgaacccttccccactggcttccatcaggctgttgggaacaacccccttccccgcagaggctggggtaggggtgttagcagtaaacagcaggagctgagagtttgcacttgaggtcagtgggttcagattccaggggtctttaccgcaggggagccatgaagctttgaacaatcactttacttcctgagctgctccacaggcacgcacgtgtaagaggcgctgacaccaccctgagttcctcaaaaggctacaagagataaggctccgcgcagtgtctgcacagcaggtgcagggtgcatgaattctgcaagttctgggagaactctgaagggctggatccagtcccctgtccccaagatgcgtgtgtattagaaagatggaggagcgcccgcacaggtctaggttcccaaagactcagggaaaggaaagaggaggaaagacttcctcctgtaggagagggagaggagacttgaaataggaacgttttggaaagtgtaggcaaaggaggaatgccatgcaagcccaaccatttgcatgcaggcccagaagagaaggtgccagaatggtgggcagggggcacttagcatggagggtctcaaagcctggcagaggaagctggatgcactcactgcccttggcaaacagcatgatggagccaactgcatgtaatttggagtaagtggagactgatgacttcctggaagggacccccctccccattagggccaatggagcagggtcagatggctagctcaggggtctgactatggaactctcctcagagctgagcagcgtgaggaggaggggctggaggacccacagggaactgcggctcctgcctgctgtgctgaccatgctttctgtgggttcgttttccaggagatctgctctgacccccaattcattgttggaggagccacccgcacagacatctgccaaggagccttgggtaagcagtggggtctggggcaagctgtgtcgtgtcaactgcaagttctgtggcttctgttcttgaaccgtgtgctgactcccatttccagaagctccctggacttctggtcccctggggatgtcccccagccagtcacaatgctaagatggaagttctatgaggtccaaaacaggtccccaagaggaggcagtgactcagtgtgaaggaaggggaaccctctcacagctgagaggaagtgggaaacaccagggccagctcagtcttgtgggcagccagctctctgcaggctcaccagagaaagcagtgaggattgtgaacactcgtgcaattgtaatacttgtgtaattcaaactaacccaagcatcaatcaagattgggagggccatgtctgagaattagggctccagggtccccagcttcattccggagctccccaggcctctgtgaagtctcagcagggagaatccaccctcatttttcctacacataacaaacatgggcctgtaattactagagtagattatttgctctgataaaccggaaacctgctatcagcctcaactggcttcccaaacaagtccattgtaacgaaaccaaccagctagaattcaccagcttcccatgcccacttcatagggcttctgatctcttaattatggcagcactatttagtaagccaggcactaaaccatacttgccaaatgagcatgctaaagccaaactgtagccagagaagaggcctggtatacagacacatttggtctgaccccagcactagtgtgttaagtaccaaggtggcctccctagaaagaggcctgcaaaaatgtcaccctgtgggggatgtcacagcctgtgcaaatcctcagggcagggcaacctctagggcgaacaggatccagacctgttggaacacagctctgctgagtgcagactcctaaaatggcagagagttttctcacctgcagaaaacaggcctcctctctctgccctctctccccaggaaggagcagactaatatcccagggtgcctaaggtgagtgttctgtggggacaagccactggctcgagaaagtggagatgataaagttggacattgattaggaccaacctggggttttttgagggttacagaaaaatgcagcagcattttctacgtgcagcctaaacagctacttcaaaagtttgaacacatcctaacgaccaagccacacataataagcacccaagttaagtcccgtttcaattccaccaggtggtttgggaggggccataagtttaaactcctgggagaaattgtttgctatatgtccagaactgaatgaaaaagaaaaatataaaccttcctaaactttcttggtaattgatctaatgtttgaggtgtctgaaggtcccagattagccattttatttttttttcttggctgtttattctggaagattctaatgagattgtgggtagtgaaatcggtctactgaactctctcccttactatggcttctgggcttgaagtcctgaaggggtggtcacatccccaagtcccaaaaggctcaggaatgacagagcgggtttgtggcagagacatgggctcagaagggttggtgacaatattcccaagtcccaaaaggcttagaagtaacaaagcagggtggtggcaaagacatgggcttcagtaatgtcagtagatggggggcttggcccaggcatcactggcacttcaatgttcccaaactgcagaggaaaggaaggtaaataaggtgacattggaacccactgagatgtggcatccagccctctaaagctgttcttgttagaacaatggtagaacgcttgactagcttgcatgaatgaggtcctaggttcaagtggcagcaaccaatcaatcaataaaatcaagccattccctgttcatggctagctgttccccactccttgatctggtatgtgagcaataagtatcgacacctgagaaacagtgtgtaactcagacaacatttttttttgtttgtttgtttgtttgatttggtttcattatcatatgcaaccatcccaagttccaagtagatatattttaaaagattatttatttattttatgtttgtaagtgctctatctgtatgtatgactttatgccagaagagagcatcagattccactatagatgattgagagctaccatgtgggtgctggggattgaacccaggacctctggaagagcaactagtgccctgaactgctgagctatctctccagcccccaagtagatatttttacgcctgctacacagatatgaaaacagaagcacagacggagaagggtccacatcaggctgcgccctgtcattgcctgagccctcggctgatgccaggtcctgcactcactttagaatcccacacagagtctgaatccacagtgctgagctgagcaaggatggttcatcttctccactagtgcctaccccaggtgcattaactgacccagtgagcctgagtaaacggcatccttagacttgtgcacatcccagcatccgtctgcgacgtctcctgcgctgtcctggagttcttaagttctttactcacattcttacctgctttcctggaaggctcagcttccagcactagtgggtgcatgcgtgactgtgtgcatgcttgcatgagtgtgcacgcacacactcatgtgcacgcacacactcatgtgcacgcacacactcatgcgcacgcactcacgtgcactcacgtgcacagaggtcttcccaccaagaaccacctgcactgcagaacatgtctgggccaggcatggactcggcaaggaacaatctacccttcctcaaggaaggctggatatgaaagactgagcctcagccaggctcacccagagagaggccagatgctctgtaactgctgactgcgactgagcctgtgcccggcagttttctggcatccagcatgagtgtaaggtccccgctgctgccacagctttcaaaccaaagacctgtgctctccgggcaagcgagtcactttgcctccaccttcatctagttaccagaaggcccaccaggaggtgtctggccacagggtgcccttctctccagcttcctagtgtttccctagtcagagaggcaacgtgcccctggaggtggagtttctggtcttatgccctctaccacttacttagtagactttatgatcttgggcaggctacccaacttctgagagctttagttttgccttctgtaatagtggaaatacaaaaagcccccaagttaacaacggttcaacttggccttcctcaactttgcgatgttgggtagctcatacacaggcagcagacagaaaccacgctttggattttattcttttcctgactaaaagcttgcatccaagaactcagtcacaaatgctggggggtgatagtgagctacaggtccagccaataattgaatcatgagggagaatacatggtgttctggggtcactcagctgcatgtgttaaattacaagagacactcaacattttgtacattttgtaataaagtggccttgtgttgggagacttcacccacctgtaggtaaggtgagtgctctggggacatttaagggaaactaggctctgtgttcattgtgtacatatgcatttgtacatgcacacacacacacacacacacacacacacacacacacacacacacactggatttgttgggatgtaattcatggtggatgccttactttttatgtttctatggttaaaaaaaaaaaaacccttataaaagcaacttaagggtggaagcatttattttagctcacagttcaagaatacatacagtccatggtgccagagccaaagtggcaggaactgtgggcaacggtcacgccatgtccacaaaaagagacagagagtgactaacgaaagctgctgtccagctccatttatccagttacacagctcaggataccaaccaaggaatgctgccagccagagtggatgggtcttctcacctcaatgtaatcgagatgacccccaaaggcccatcttctaagtgatcctgaagtctatcaagttggcagttaagtctaaccatcccattaagtcaaagagcatctatgatgaaaatactccagggccggaggaaagtgagtgtaacataggagccagagttagcacgctggagaatcctaaagaagttgataatggaacccagcgattcgccagggagattaggggagaagtaagtttggttagaagctgagtctttgccatttgaagagctcagaatccaaggttgcgtgtgccagggtgggaagggcgtgcccaagtctggagcactcgggagctgaaaacgggagggaggagcacaatggggcaggtgctcactcctcactttgtgagttgaactctcaaacattctaaacaactaaaaatgaaagatttgaagtcagaaagcaaatcattaaagaagatatctctagcccagaattgcctggaactcgcaatgtggctcaggcaggccgctgactggaggcctacgtgctgggctcccttctctactcagtacattgtataaagcaaggaggatgggttagcttgccccactaaagtagccaacacccgtttcctagttactgtcttgaaaaaaagaaaaactgcacatgtcattattgccgttattattgttgttgttgtgtgttgagatagtggcttgctgtgtggcccaggctggccttaaacttgcagcaatcctcctgcctcagcctcagagtgctgagattacagatgtgctccaccatgtccaggattacactccagatgctagaattatagcctgtgccaccatgcctggatttcttacttatttatttgttttaaagggttttctatgtagcccaggcctagaattcatatttacctcacccttaaacttgcaatcccttgcctcagccttctggacgttgagcttacaggagtaccaccatacctggcttaaaaatgttaagtttttatttttttttcacttttatatgtatggctctctctctctctctctctctctctctctctctctttctgtgtgtgtgtgtgtgtgtgtgtgtgtgtgtgtgtgtgtgtgtgtgtataccttgttcatgcagtgcccaaggaggccagggaaggtactgaaccaacatgtaggtgctggaatcaaacccaggtcctcttggaaagcagccagtaccttaaccactcagtaagccatctctccagcctccaacatgtgaatttttaaattcacttttataataggcatttttgcattttaataaaccttgagtttttagaataattttagatttacagaaaaaccaggaagcagtgcaaggattcctattcccagaactagtttccagtcttaccaccatctcacatgagcgtggtacattgacgaaccagtatcggtgcatgtgcctgaagtccacatttcacgtagactccttatattttacccagtggccttcgcagttcaaggtctcttccagaatgccacattgcatcatgtctcccaggcacctctcgattgtgtgcagcatctcggtccttccttgtttttgttgaacttgtcagtttcaaagagtatcagtcaagaatgctatgtacgatggccgtctcttggaatttgcagattcctctttgaaaataatgtgtggagatgttgaccatggcagtgggtgtctgtaatcgcagcactcagcaggctgaggcaggaggattactggtttcaggctagcctgatgtgtgtagcaagaccttatctcagaaacacactaacttaacaataagataaaagaagatgatgtctgtagaaaacaaaaacaaacaaacaaacaaacaacaacaacaaaataaaaaacaatgaccagaaaacaggtgtagtctggtttaatgaagaaagtgaatccacccttctctcttcctggtccagccctgccccaccctcctgctccatcgccccacccccacagaggaacactttagtaactatgagtcatagcttctgcagcttcctttctgctgcaaactctcgcccagctctctctggaggctgaggttgctgtctgcttcccagctgtcttcccggctgatgctaaggcagcagaaacagggctccagtggagtgctggtctctgtttggccccgaggctctgtcttgccctggctggcccctggcttggccatcagagtgcaaggctacagactcttgtgatagctagctctgcgcttggctgtgggagtgaagagtggtgggagtccatcagagtttccagctcgcctgggcctgtcctctgaagccccagcatgcccagagggtagtagggtatgacccagttctaggtctgtagatcaggctatgacctttgctttgtcttggtattccctcaactttcccaccagctctctgtggctgggagccacgccacacccctgtacggcttcagtcatctcatgtccgagaagaaagggacgggtcagattttcctaaggcccacacttgcaacattctgtgattttaaaattcctcatttcaactatgcttgggagcagagtccagagtcaatggagcccttgctcagccgcagctcccaacagttagctccagagaggctcctatgtggggctttggcagtaaggacttcatgtcctgtgaagtgcagtgggctcctgcgtgatggtgagccccaggaggagatggtccatgctgcctctgacttgcctgagagcaggtggccttagaaggcagttgtgcaatgagtcaggctagaccagcactgtcccaacagagcacttagcaatgatgcaaatgtccagctgcactgcccaatatggtggccaccagtcacatggctgagtgacacttgaaacgtgaggaatgcagctgaggaactgaactgtgtgttttgttttgtgaactgagtccccactctatagcttgggctggccttgaactcaaggagcaattcctggctcagtgtcccctgtactgggattatagatgttcaccctcatgactggtggaagaaataaaattgtaggtgttatttaaatgcagctaatggtgacagtagcagggggcagtgcagcagagggtggggctttggggtccagcctcctgtccatcctttactctctgtcatggcctggtcctcacggcagagccaagcaaggcacatatgtcagtaagcatctggaaacatcggggtagttggagggcttgggtgcccaatggttagaggctagcccctccctctgtcacttcgaacagctagagtgctcttccataaaatggttataacaattgtgaagaagagatggagtaacttacagaggccaggcgcgcaagaggctgcggcatggtaaagatttaataaaaaatctctgggggcagtgtgcctgaggggagtatgttcagatcaggttgcattgcactacccacctttcatgcctggatgggtccctccttagcacttagcatggtgaccacggtgtcagagagggttgtgaccgagaaggccgtactggggaaggtttgagattcccctgctccagcacattggagttgtgatggtcacaacttcctgctgttttcttcccaagccagagacccattcgtgccacgcagactgagctcctgggccacatggcctgggctcctgcgccacacagctagggctctggtgcttgcctcaacaccctgggagtgtcagtcagcagtttccaattacccatctgtgaaatgggaaccatgaggacatttaaatcctttccccctccccccacacaatagagcatcttgggacgcctgactctgaggtgttcttgagaccagagcctctgggggctcctccgtccctctttggatcagtggaaaactggcaatagtccccgtcaggctaaccttcgctggggtgtttcccctacatgttgttgcctcagctaagttgtcttccatccctctgggtcctacaggaggggatgaagagcacggacctctgtgagcaggaagggccctcctctctccacttctctctcttctgagggtgtaggaaggaggcagtgagctggggaagagttgggttgggcatggggttgtggaggatgggaaggcagccgctctgtctgggtaccaggagaaaaaaaaaatcctacatttgtgaccgtgggagtggcccatgaggggtggggctacagggaacaaggtaaaggaaacctggagcagatatgttccattattccaggacaaccgaggaaggaagggagctttacaggcttcctggtgaccagactgactccagagtaggaaagtgtgacagaagcgtgacaaaagcatggagagagccttacagcttcatttccctctcctctctgcggggtctccctacagcaggagagaaagactgaatgaactgggggtctttggcacaagagactggaagccttatgttgatggggaagggttgggtagagttcaggcttccaccctccccaagtttagtgaaaatgacgggatcgcacatgtgttgggaactcccatttggggacgccgtttctggcctgctgccaggctgtggaatgagtaatagcagggaaggcccagagtagagtgacttttcatcaccgtgtcacaggactggctcgggctgggtgttccctccaaagcatcggttctcccatcagacatcccgcataccagatacctatactgcaactcataacagttgcaaaattacacttatgaattaaaaacgaaataatgttatggttgggggtcacctcaacatgaggaactgaactaaagggtggcagcattaggaaggtgagaaccactgctctagagaaacccacaagccatctccagagggccctgaagttgactcattggtccttctcattccttttgaagttgagatcttcagctgtctgagaactggaggtcccttcctctctgggctgccaggacaggagagcagcctgtccctccctcaccaggtgtcagatgggctgagactgaaggctgaaatgtagctaggagctgcttccacaatctttatcatttatccagctttgggcaagggagggagccaccacaggaaggagcctcaaaaccagcaggaccagaagcaggctttctcctgaatgctgttcttgacattgaggcggagaattcttcatggttgggagttcttgcacacccagcagcatcccgggcctctatccattgtgtgcctcaagcaccctctcacttaggttaataaaaaaaaatgttgtgagccccgagaatgttcccagtgtggggaagatgaaaaatgcctcagctggagtccccagcagaggagtaaagggagagctttggaagcctaaagcaccatagggtcacgggcgccaggccactgaatgccacattggaagtctggaatgctgaggtggccggcaagaaggctcccccatgggtggcagtgataatggtgactgctaaagacggcccaacacctgcagcattgcagcagcttaaccaaggaagatgaaggatctagcaacatagcagccagggccagcttacagggaagttgagcattgttgggatatttaagcatgtgggagagagcaccaggcttcccaccagcactgggaggagcctcacagaggaggaggcagggaggactctgagcttctgccaggcctgtctgtgtgcttctcagtttctcacctctgggtcccttctaaaccactcatcagaagtgtgtgggaacacatctcaggtacagggtgctctgtaacctgcagactggctggttgtcctgggcatcctggcactggacaacccctagagactcagtcagccggtacagctaaaatccaactgctgcactgtgcccagaggcgctgacaagctgggacaggctggtatcagaatgtaaaggggaaggcgcctccgtctcaggccccagggcccagtttggattccagacctactctgggggtctcacaccccatatctccagacttggcctctcactgacctttctagcctgggctgtgcctattctccatgcctttggccttctctctgaaaatgctcccacccccctctcactcagtcccagctcctgctctgctaagcccacctgtcggcttccctcttccccgcccaggcttgacatcaccattgggatccagtttccatggctgtccttactggctgtgagacagctgctccagtgccttggcatagccaaggaatggaggtagaagagggtgatgccaccctcctgctcgaatgcatgggacagaggacagacagaataaccacaagagagtcaagcacaaatgagggaagtaaccatgaaagcctgtgagaagaaaggaggggatgaagagcacggacctctgtgagcaggaagggccctcctctctccacttctctctcttctgagggtgtaggaaggaggcagtgagctggggaagagttgggttgggcatggggttgtggaggatgggaaggcagccgctctgtgtcctgtctctcttttctgaacttaagcaccaccttgacctgtgtttgaagtttatgaacgatgggtatcttcctttcctggccttgtaactcacccacacccaaggcatggctcagctgaagcagtgggtggccagactatccacaggcgattgccctctggtgcacaaagcagtgcagagcccagcatgtcctgggtccccttagtgctttcccagtctgtttcactttcctgtttgggaaggaaagatgttgatggctgaaaggaatgaaagagaaaacacccaacagatgtttcatctcccccttggtaactcctacagcagctgcaaatatgagtaacccagccacagacattcccacggtgatgcaggtgaccctctcctggacacggggctgccacacagggcacagacatgaggaatacagctctggaaatttactacatggccctgaatgaatttatctttccagaagagggcctggagattaaaggaaccattcataaggcctgccctaagggagggtctgggcacagcctgtaccaacagggacctgtcctgcaagcttgggtgtgcagggaaggccatgagttcgagaggtgctcataggagccagagcaaccaaaacaatgagccttttcatccaggtagactaagtgagttcccaaggctgaggccaagggacagagaagcccaaactctagctttaactggctttggtcaagcaaattaaagcaaagagagaaagtctgaatttggagcctgagggccaatgtatggaagtgacttaaaggtctccttgtctcaggtatgccaggctagagagaatatcactgggtagttgaagaatgggtaaatcaagaggtggatcctggtctgcccaagcagttggctgtgggggaacccagtgaggacatcggggaggaaactgagcacaactgtggactcaggaaggaggaagaggctgctggctcctgagagccttgcagccttgtgttctggcagaggaccaagcagacaagggaccccaaaaaggcccgtgactctcaggtcctggatccagctctagaaggagtcaagaggaactctgtttcccctgaaaacttggtgctgctcttgacctcagtgatgaccttgacctcggagatgaccttgaccttagggctgaccttgacctcagtgatgaccttgacctcagtgatgaccttcatctcagtgagtctttccatttgtttggacaccagcactttctacaactttggaagcacttccaaagtctcagccagagtaatgagacagagctcagcacgccactgtccctcccttctcacccccacctcagtcacaatccctagccctccaccccaaccccttctgcctgtttcacaccttccagaacgaaattgccaaaggtgggtaaggcttgcacatgaggaaaataaagacagcaaagttcacccaatattaagtgtccacatcaggacccagatctaggtttctggccacagttgtgtgtctccatctgcctctgggggacctcctgggccacgtgtgaggtcttcacctctctcgcttagcttcctcaccatccaagctgcctctcgaccatgactatccaagactctcaggtcacaagctcaccgggcagctgccatgtccagtttgtttgcctcctattagcaggtgggacacagtggtgctaggacaatgtcagagggatgggtcacacccagggaaggaaaatccacaggaagtgagagcctgggccaaggaacaaagtgagccacagctacaagggggagagagtaaagggcctagagggtggagccttgagaggattgtgtggaggcttatggtgtcttctggtgtcaacaaacagatatgtgaagcatgccagagagtgaaaaactagaaaaagaaccaggtaggccaggtctctgcactctgcctgcagcaaaacacaccctggacaggaccctggaggaacccagcagaaggcaggatttctaaggggccaggctggctgtgagaccctcaaccactctcctgaccccagtgatttcctttcggtgctggctctagcctccagagccctgcctcccctatcttcctcagatatcagtcattttacctcagagttttgtaattcaaagcatccaatgtgttggtatacgtagcccaagtctggtctttgtatgtggaaggagagtaacaatcttttatcacagcaacaaagcccagtaggagtagaggctgcaacgggaggacacggggggggggggggggggggggcgcggactgcagcttgggctgtgcagttttagtgtcttcccagatggtgtttgactgacagactggcattctgtggacagtggccacaggcagctcagtaacctctgggctaaccatgacatgttcagcagttgccaactcccacccttgggaagcacagccttggggactctcatgagtgacaagtgctacagtgacccctctctgacccttgtccctgatcatgtccagggtgctggacagaagccagtatgaggcagacgagagatggtatgtcacagttgtacagtggccaaggcagaatttatttatatttacatgtgcctctctctcctcattcccagcaagcacagacaaccgtgtaatatagacagtataaaacaggatagcttttaaaggaaaataagcaactataaggaaaacacagtctagagccagacagattacagacacctgtaatctctgtgtttggaggagggggagggggtttgaggcaggaggattgctgtgaatctgaggccagcctaggctattagtgagttccaggctagcctgaactgcagacttagagattgagaacctgtcttaacacaaaaaaagagagagatccagaaggaagaaggccccccaacccagaaggaaaagcataagttctgtcaaaggctcttaggctgcagcagatggccctgggctgagggtctgggctccctggccagcagcctaagcactgcagtgagagacccagtctcaaaatgcagtgaatggacctgaggaacagctccttaggatgaacagcacacacacgcacagcttcctgctcttgtgcatgaacatgacaacacacacataccacacatacacacacacacacacacacacacacacacacacacacacacacacacaccacacacacaccacacaccacacacacacacacacacacacacacacacacagacaccacacataccacacatacacacacacaccacacacataccacacatacacacacacacaccacacacatacacacactgcacacacacacacaccatgcacacacatgcatgtgcacacatgcgtgcacacacacacatgtacacacatgcacagcttcctgctcttatgtattcatatgatatacacacaccacacacacatatacacaccacacacacatatacacaccacacacacatatacacacaccacaaacacacacacacaatgcacacacacacacacacacacacacaccacacatatgcacacacgacacacacacacataacacaaacacacacacatgcagagcctcctactcttgtgtgtatgcatacacatgaacacacacaggcactgacagcctcctgttcatatgtatgcacacctgaacacatgcatacacatcaggctttcctttttccattaaccgtgttttcatttttctaatgagcttggctgtttgctcttcatttgctctgcagaaatgagacctttgatctaggtctgaataaggtttatttttcatgttttcattagtttactttttgtgactttcaccatgtaattcctttactttgacatagctaaatttactattttagatttaagtattgttaacttataattttaaaatttcatggcttctgtattacaattaaatagccaatctcctctctaagattgcaatagaattctcccactttctcttctagaattattcatggattcatatatatactatattaaatattgccatagcataaacattaaaatatacaaatacataaataataagagaacaaattatataagtggatagtttaccatagttatgaatgtataaatatgtgtaaatataaatttaagctgcataatatgattgtttatttatgaatattgaaccatttatcatttcttctgttttttaaaagtacttatctgtgagggggacacacgagtgtggaggtcagaggataacttgcgggagtgagttctctccttccactgtgtgggttctggggatcaaacccaggtcttagggagaaagcctttgcctgcagagccgtctcacagccctgttctttggctcatggtttcagaagtctctttgtcacttagctctgttacttagtgggattggaggcagaaagggagcatatggtaggcaggagtccaagggcctggggaactcttccgcctaagttcccaagcgctagaattacagggcgcgccattactgcaggcctctttcagatactgttttctggctctgcctcatgcttaatgatccttataaacttgggtgtcaactaggttccaatttttatatttttattgggaccatactttttatagaccaatttaagaggaaaagacatttttatgataatgaatctttgtaactgagaatatgggcttcttttaaaaattaaggtagatgattgtctctgcccccacaggcagggtcctgtacatctttggagttgttagtgaaagtcaacagctgcccatggctattctctggaccccgacctgcaggttcagggccattgcccaaattctaaaacccggagtgggtcctgtaccatgtcaccacaagggagccaccatcagaggaaccagggaaaacatgctctggtctctggtctccaggtcccccactgtctaaaccataccagcagccattgcccctggatctactggccagggggctcctaagcagagaacaggttggagggtagaaactaaacacagagggtattgaccaggggctcagcctctgcccaccacactgaggctccagagacaagtgtttctgtgttgagataaagagagtaatttggggacccaaaaatagtccacagcaaatgaagcataagcacactttgtacctgtgggacaacaacaatgacttccaggagaagaagactagagtttgtgtcattcaaggtatcccacgaagagacagtccttcccccccagagtgggccaagctctgaggccaagctctgagtggccacctcactcttcctcccaccagtttctttctttaacaactgaaaagcagagccaagacaactcccatgaggctcaccgtgctcaagtctcgagtctcttacaggtgcaggttaaaatattttttttctcaagctccagccatgtggccacattccaggggcctccacccctggtccctgaaggcatcctttagggtgttcctggagctaaaacagattagttatgtgtacctttgttgcatttgagttaatctggttatcagacccttcccaaactagccagctggcttattgcccacccaggttgtaactgcaccaagcaagttttgctgagaaggaaccccagggacatctccaactagggcacctgtcagtcattaggattatccagaagggacatgtttccataaaatatgtttcgcagaaggtggattctgagcttggtggggaaaatcaagaatgggtgggaccgaaggaggaggtcactatcgataaagttgaatgacttgtgtcctgaggaggaactttcccacaaaaatgggtcttaaaagtggacttagtactctgcagagacatacttaggtcacctctcaaggactaacgtccttaggcactgctctttgaactgggtgactctggaagtgacaccagcctatttcaaagccaagcatgagggtgtgcaagaaagagattaaatgaacagacaacggtggcaggtattcactggctgggacctgtggtgagccactgcacccactgaaacctgtttcaacaatgaaataggatacggatatttaccctgaactgtttaatgaccatgaaaggacatgatactgtgaaaatacatgcaaacacttagacaggcctggcacttggtagcctttgggcatgtcagctgcacagtcattgcatagagattgatgtcaagaaagcaaatatgaatcaatatttttttaaaaaaatgggcattggagcttcccagcgtacttaaaaatattctgctgaggggaatgagggaggaagcaggaatcaaatatgagatggggcttcaagtgtttccactttattgaaaaccaacatattcttctcctggcctctaaggctccctcactggacttcagaatttgaaaaaaataaacgtgtgactataagatttgtacgacttgagcaggatgtggtagggcacacctgtaatcccgtcactaggagtctgaagcaggacactttgagttcttggctggcctatgctgcacagtgagaccttgtttcaacaaacctagaacacacttttcttcctgtcttggctgtgaccttagtgtcattttcttggctctgcagtgataaccttttgtgttgtcttggtgaattaccttgcactaaagagataggtcttaatatttcgtaaatgtggtggtttgcagaataatgacaacatggactcatgtatttgagtgcctacttactagggagtggcactatttgaaaggatttggggctgtggccttgttggaggaaatatgtcactaagggtgggctttgaagtttcaaaagcccaagccaggcccagtgtcactctctctctctctctctctctctctctctctctctctctctctcaccctgcagacaggatgtagctcttaggtcctgcctcagtgcaatgcctgtcccatgctctctgtcatggtgatgatggactaagcctctgaaactctagggatgcccccaattaaatgctttctttcataagagttgccttggcctcggtgtctcttcacagcagaagaacagtgactgaggcaatgaaccaatgtattaggttattaaaatgcagagcttacagggcattgttagtgtgttctcccttagcgctaaatttgaattgtagttgagtgttcctagtgagaactgggtactcttgatcaaaaaaaaattactattatgctattctgaaacaaaacctaaggtttggctgggcatgatagcacatagctttagttacagcactggagaggaagcggcaggcagagatctgtgagtttcagaccagcctgctttacatatcaagttccaagccagtcagacttccatagtgaattcttgtctcaggaaaacaaaacaaaaaacaacccagtgtttgggctcagagaatatgtatgtgagacctgccaaatacctcctccatagccttcctgaccttcgtgataagaacaatgataaacatctcatgaggactatgatgaggtcctaaaaaattcagaatattctttcacagctttaaaggaattgcacaagtgttacatgcctgttaggtttgtgtttggttttgggatgtttttctgtttgttttgtggggtggtttgtttgtttgtttgtttgtttgtttgtttgtttgagacagggtttcactgtgtaatagtcctggctgtcctggaactcactctgtagaccaggctggccttgaactcacagagatccgccagcctctgcattaaaggcgtgcaccaccacctcctggcattgcctgataggttttaaactcctactggtaggaagaatacagactggaagtggaggagtctgggccgtgccccttccgggagccgggagctaagcaggtagtttagtttaaagccactacttcatcacccagggaaccctctagggtcatgaccctttgagaggaaactggatagcaagtgatgaggaaagcagtcctcgccaaaggcagggtgagaagaggctaattcccactccgctgagctggagatgggtttctgggacagaagacataaagcatgaccactgatctccaggatgtggccagagcacacaggacagcaggttagcagtgacgtgagatagtgtgtgaacctaatctgaacactgacgtggatgtatgaactacaaataaacagatacagcgccactctcaaaggccagtctttcacgaattcagtcagagtcattgttccctgaatagcacattggtctgcagtgacctctgagattataagaacaatggactggccctgaacacacgcctgtgtttccatgcacatgctgaagtaaaagcattgattgctggggctgcaggaatctaaagacggccactgatggactcagacagcaccaggaatcccctaggcggatgcccaggatttgatgccacattacataggatctgtggagttcctggctcaggtctgactcattacagttgggtccttttctccttttctcctctctgtctgtctctgtctctgtctctctctgtctctctctctctctctctctctctctctctctctctctctctctctcacacacacacacacacacacacacacacacacacaccacccccagactttcttccttcaagtgtcatggatagacagaaatctaagcagcttgcaagattcctagaaaatccaattatctcaaagaaagctagactcacaggccttgcctggctcctaaagaggcctgaagaagaggagggctaggagaaaagagggactcctaccattgcaggaacagctggtgcctggcgaactggtcctgcggtatgaggagtttgaggggcttgaatgggacagtggcagacctcagaaaacttgaaggtctttttggtcactaaatccacaggtccagctaaggcaccacctgggattacatggaaaagcacccccagatagatactcttccctaccaatcctcaacttcacccaatagccagagctaaaaatagtcactgccaaatttcttggggacttcctagcctctgtgtgtcagtctccagtttgggctgtataatggcttcactgagccaaagggttccttcggaagtccgatggccaataaaatcgtacctttaaaacttgggcctgcagctgtttggctgtggaaagagcacagaggttcgaatgccttatcactctcagctttaacttggagacagtgattgcaccactgccctcctagagctattgtgaaggataacaaagagaatttgaatctcctagagcagtgggcagcatgcaggaaggcccgagcaagtaatggctcttgcccattttcccctagcagtgaagcttgcagcccagtgtgctgggtaaggaaacagggggttgatcagttcatgtgtctgaaaaacttcaagccaggtctggtttcaggcacagcttgcttcacagcttgaactgcggctctcatttcttcatcggcattggcaaagtttctgtcgactgcccgcccctccgtggaggcgggatggtgtcagctcttcagtcaatctacatctctatagaggcaatgcagaggaggccaccttccccttctcccccaagctcaatcgggggtcattacactttgctcctgagcctgccactgaagtcaagtgaagccccatggtcccagtgctcctctggaattggggacagagccatagctactgaaccttggagacagagtccagggaaggtcttggtgtcactgggaggacagtaaataacggtgagcaggaaaactacaccatccgcagtactgcgccacccaccctatttcaggagctgttgggtttgctttctttagtttacatactgactaactggggaggctgtgtgtccattcaccactggctgccactgtttgtcatggcacatccaggcctcgaagggctgaaagcagctgtgtcagcagcagcagcagcagctcaggttccatcaggatttgcttaatagccaaccagaattcagaactccataaatgccaccacaagctatttcctatgaaacgttatgcaaatgttccttcctgaaaggtgtagcatgaattctattattggtattaataataaaatccagagacagatattgggattaaagctgaagatcgcataagcaaagcagccagcccctagagaggtctcacctctgccaatgctcagatcgaaagggcgatcctgtcctgagactgcacctccagattgcatccatctccatcaaaactcagactacactgagctcctgtctcctcccaccttatattcctccctctgcccagccatatcccttcctgtctctacctctatagtgctgggattaaaggcgtgggatcccaagtgctgggatcacctttgtgtgagctgtttctctttagatcagtttcgtgtagcccagggtggccttgaacacccagagatcagtctgcctctgtctccctagtgctgggattaaaggtttgcaccaccactgcctggcctctattgctagctagtgtgactagcttgcactatgatcttcaggcaagctttatttgttagctcataaacaaagtatcaccacacaagactgcagtaaacatctccttcccagctccccttgttggaattttgtcccgaacagtgtccctgtcggaaaactgtgccgtgctgatgctggaccaggctatttgtaactgcagggaatgaccatgtgcttgctgcatgaagctcctgcggtgggcaccaatggggaccgcgtgctttaaacaaagcatgggcctgcggcttagagggcctcatctcactgcccctgtccctgtttggtcccttctgtgtccacatgccagaagtgagctctgcccctactcaggacccctcagagtcagtctgagctcatgtgtatcagctcctggctgtccgtctgcattgctgcatactcccgtgaccacgccgcctgcccacacctcttccttgtctctgaatccttctcctgaggaaggagccccttcctcctgttgctgcattttctccctctcattcaaacgcctctgctgcccggtcagcagagctgggctccaaggacacagttcagccaccacagagttctgagtttctcagagaatgaacctctcttcttgtatccaaccatccacccgctatgacatttctcccttagcagtgccattaaaatatccagccggcctgtccctcaaacgaggactatctgaaacaccgctctgtctatccatcagtaatgctgagtttcaaacccacagctgcaggaacaagacttagcatcctccaggaactaagatctgaccagcgctcttggttttgtgttctcaggggactgctggctgctggctgccatcgcctccctcaccctgaatgaagaagtcctggctcgggttgtgcccctagatcagagcttccaggagaactacgctggcatcttccacttccaggtaaattaagagttggcttaggcaccccctcaccaggctcaggggctcaggagtcccccagtgtggctggctcttcagctcctcagtcgttgatgttttgcaagctcctgagatcagtgttgttctgcggaggatgctaggagagatataagatgttcctgacctgcccgtgatgtgagatcccaccagaatggctgacagggtggggggtggggtgattcatggaggtggatcttggtgtccaggaagtaatgtattcaggaagtaatccacaagtttcaaaaaaagtattgtttgtagtttgagataaatgttaaaacgcttcctccttttgtgatggcaaatgagaactgagtacgtgtggttttggccacacagacaagctccattgtcctctcttgcttggtgaggggtatgcctaccattggagactgaagggcatcatgggaacctacaaggggctgggtgggagagaccccgatgaggctaaggctcggagtcccagcgccaccctctcttgtcctccttgccccgcagttctggcaatatggcgaatgggtggaggtggtggtggatgacaggctgcccactaaggatggggagttgctctttgtacactcggctgaagggagcgagttctggagcgccctgctggagaaggcctatgccaagtaagtgaccacgcccttcccaacaccccaccctgcccctactgccctggactccaaaacagcaggagctattcagggatactgttttgagtagaagttctgttctataaaaggatgactttggcccaaattgggctcttaattcaaggaggtaatgtgggcatggagcctggtcacatggtgtactgataaatgacagtcatcgctgtttttaaccaagtgaaccagaacattctggggctgactgctctggccttgagaagaaactgtttctttggtgggccccactctgtctattcaactgaaaagagcaaaaggtttgccaggaggcaaaactacccattgcagaggtaggaaaattgtggaaacccactcaaaacaaaccacctggctggtaagaatggtttcccagttccagtcctagctacatctcacccagcttgcccaaagttgtgctgggcccactcagggtgtcagccctctgcccaggggcctcggttgctgatgctagtggctcctgcatcaaggtgagacaattttagcagctggtgggtttagaatccccatagccctgggcttcatgtcctcggctcaaggactgatggagaagcccggcgactgaccacaggaacccaccctgtgcttctctgggaagttgggtctttttaagcatgtaactctcaaacagccaattagccaacctcccctttgtgtggtgggagagtcaatgccagaggctgggtcagattgtcactaagttcttctaactccagggtgctggacaattttgaaaacatgtcatagccatggaggaaacggaattagggggacagcgccttgccttcctgggcgccccaagttggagacaaagacaaggagaatgaaagcggaggatctctggggtcccgtgagggaggggatctgagttggaatgggatggcattttggggggatgagggcacacggatcagcagcatctagggcagtgagtgtcagcctgcattcccctccttcaggatcaacgggtgctatgaagcactctcaggcggagccaccacagagggctttgaagacttcacaggaggcattgctgagtggtatgagttgaggaagcctcctcccaacttgttcaagatcattcagaaggctctggagaaaggctctcttctcggctgctccatcgacgtaagtcctcaacaccctggaaacgcccagtctactgtggcttagggaaagccctgacagcatccaggagctattaagaactttagcgcatcccttgttctccttgctgctcatctctagaagccaggagttgctaggcaatagcaaggctgtctgagtgcatttggtatagagatggtgcctccagcccttctgtccccagcccattttccattctagctccgctctgaatcacccgactcacagaacccaggaaagtcccccaaccccttctgcaggtctcgagaccttctcccccactttcagggctgtgtgagctgcccggcagcttctcactctgccccagtgcccatgggacctggagaagactttagagagtaccagaaggaattgtttccccaaaatagctctgcaggggagatgcaacaacagggagatgtcggaaagtgggcatggtccaggccccaggagtttcccaaggctgtgcccaaatggtgggaaagaagtggtttttgaggaattagcgatccaatactcggcttctgaactgaggctggagataaaattgccatcgtgtgcaaatgagctgggcggggtggcgtgggagaccagagcatcttggccacagatgcccactgggtgtctgtcattagggcccccacgggctcttgcctcgaaagggagtcccttcacgccctctccatccagaagatggctgggggagcgggaatgggtgcgccaacttgctccttggcgatcagcaactgaaagtggcacggggctcccccaggtggcaggatggatgtgcagagttccccaggctgggccccgcccccgtgccttgtgcgttcccttgggcggtttgtattagagttggagcagctgctttctgtgtttgcagatcaccagtgctgcggattcggaggcagtcacgtaccagaagctggtgaaaggacatgcgtactccgtcaccggagccgaggaggtactggacctcgggagtcctttccccacccccaccccggcaccccggcacgtggctgtcctgggtggggcctccaggctcgcatcagcccagcgcgcgctgccccctgctggctacagaggctgctgcagatttaatgtctgagtccgtttttaaaacaaaacccaaacacagcacttcgcatctgtctggtattttatactctttaaaacaatgctagtgggcatggtgcctcatatctgcaatcctagcctttgtcttccgtgtgctagggctgttgggttttttttttttttggatttttttaagattactttttttatgtgtatttcaacattgctaagttttgccacttattctgtctccatatgcatggctggtttttttcttcctagctatttacaagtgagctgcaggtatggtggcatgggcctgtagtcccagttacttcagtgcggagaacgagggtcacttgaaaccatgagttcagggccagcctgggtaacccaatggaaccttgtcttaaaacaaaaacaaaacaaaaaaacaaacaaacaaacaaaaactctgcatcttccttttcatccaatgcctttaagcaaatgagaaagcttctctgagagccctaaaggacatcctattccagctagttaaatgagggttagccataacacccaaacacagacaccagggcagcccaggctgtttacacctcaggctgctaacaaagattaaagccagatcttgggagctttctttggtgtagttatttatttttgctttggagaggtgatgttgtttgttttgttttgtgttcagatggaatctgagtacatagatctggcttccctggaatttagggggaagcctcctgggtgcctggagtttaattctcattttccaaacctgggcaacagtgatagtctgagggtcaagcccctcccagcttctgtgaggctcctctgcccacttggttcactacgaaggcgggtgtaggtccgagcccctccaagcctgcatgtgtaggtggagttttctgaaggactgctgattagctcccaaataaccacacagggacttaattataaatgctcggctgatagcttaggcttgtttttagcctgctcttataacttaaattaactcatttctattaatctctgtgctgccccaggctcatttacctcatgtatgtacttcccaccctgctcactctgcatctcagagcatctcctctgactctgcccttcttctcaacaacattctctctgccccccaaatcctgcctagctgtcagccaatcagctttttattaaaaatacaagcaacatgcctgcagagtgtacagaagggctattccacagcatgcatggtcctcagcctctgcctcgttggctctttcaggttgaaagctcaggaagcctgcagaagttgatcagaatccggaatccctggggacaagtagagtggaccgggaaatggaatgacaagtgagaagggagcagggtggggtgggggagggggaggggtgagccagggttcaggaaggggggtcagggtatgggatgtgccagaatgtgggggacagagtgtgggggcagggtgtggtgaaccagggtgtgggtgggccagtgtatggggtgggccagggtgtgggtaggtcagggtgcatgcattctattaggacctgttgcagcccagagaggaggcactgtgtgaggtgccaagaattgaggttctgtggtcactcactgatcacatcaagtgggtcccatggatgtactaggttctgtgctccttggttatgctttgtgtttctcagtggggtctgggtccaggtggagtatgatagcctcctacaggaggtctaggccctcagcagggagagtgggtgtgctcgctccttagcatttggggactgtggagagaaatggccattgtcacacactcattcctaaggcgtctcctatcactttgctttccagctgccccagctggaacacggttgacccagaagtgagggcaaggctgactgaacgacaggaggatggagagttctggtaagacagtgggggctccgggggaagagccccgcccccagtgtactcctcataggaaagttgctaaccagagcatccgccagaaatgtattcaacatgccgagggcattggtgtggcatcctagctttgccattcctaagtgcgaggcaaggcattatacttctgtaatcccagcactctagaaactgaggcagagggctctcaaatcagagaccaagctgcttaccccaggctatctagcaagaacttgtttccaataacagagaaaaaattctccatacattcctaaacaacttttaaatctcttcaatttgtccatctcagtagtgaggttaatactctgagcaatgtcacaaggactgagagaaattccttcagtaatggtcagaccccaagagaaaacaaagatgggacctttcttcccactagtctctaaagagatacccaggctcattaagaagccaaccccaaggcgaagggatggcttagtggttaagagctctctctgccaatgcagacccgagttcagttcccagccccacagggtagctcacaattgctggtaactctagttccgggggacctcaccttcccaggctcctgaatgtatgtggtgcacacaaaccagtgtaagaagtcttaaaactaatagaagtcttttaaaaaaagaaagaaagaaagaaagaaagaaagaaagaaagaaagaaaccagttccttagtgaacagaggaggaccgcgtgtgtgcattgcgcccacggaacacctgccatggttactgtttaccctgacagcccatgtgtagtctcagctggtatttattcatggctttcattccccatctgagagctctgggatgcaaagagagctcatccatttgctcaaagtcacccacttggaaagtggcagttacagggctagatttctgagtctgtggctctagtgcctaccactggggctcacccagctccgagtctgaccaggtagaaggccaaggctggctccgtgtctcctgtaactcggggcagacacactgtctctgctttgccaggatgtccttcggtgacttcctgaggcactactctcgcctggagatctgcaacctgacccctgacaccctcacctgtgactcctacaagaagtggaaactcaccaagatggacgggaactggaggagaggctccactgcaggaggctgcaggaactacccaagtaaggggcgtggccactgcaggaactacccaagtaaggggcgtggccactgtaggaactacccaagtaaggggcgtggccactgtaggaactacccaagtaaggggcgtggccactgaggctgcagccatggcatcccaccctgacggtcagcctcctcctctcccttctccactagctgtggtctcgaagctctgttttcccagccacattacttcctgaattcatttgctgtgaaaaaccctttgggccccagatcttctggtgcccgtgaccctcttctggtttatagaggccgtgctaagtcccagctcataaccagctagcctaggccgtcacacactgcatccatggagcacaccagcctctcattgcggtcttccaccctcgtgtgccaagttcatttaggaaatgtagacagccaggcagcagtggcacacatctttaatcccagcactggagaggcagaggcaggtagatctctgagttaaaggccagccttgtctacagagcaagttccaggatggctaggactacacagaggaactctgactcaaaaaggcaggagggaaagaaggaaggaaggaaggaaggaaggaaggaaggaaggaaggaaggaaggaaggaaggaaggaaggaaggaaatgggaaatgtgactgagcccagctcacatggggagagaatttctcctcttctccactctttgctgatgtcctctgctgtctggatggttgagccttcctcccataggaactgtgtggtcttgatgacatctgccagtcatagggtggagcatacatggagtcctgggaactctaccaaagagcttcatctgtgtattgatcctctagacaaacttacttatttgtggctggtctgggatctgaacccaggcagtatggttatggagtcattctcagtctggtggcaggccatggtcaaactttgatgctctgttgcagatgaggaaactgagactctgtgtggtgtgccaaacccacagagcaagtagtctgtgactagctggccagtccctccagtcccagcatgcattgtccaagtgacagctctggaggacaccactgggaagcccctctgccacccacaaaaatactccatacctattagatgttgggagggagggtcagaagactcaacaaccctagagtgaatgctcctggccttatgggatgctctccctcaacagtacttacttggtcctgctgaggtaatctagaaacttcctacataaatgagtgtgtgtcgacaccactggacttacagaagcagtggcactatggctgccaactctgcgagaccacgcttctaactgcatgggggacaggaggcacttagcataattacctcaaacaggagtgactcagtgtcttcctgaaaacgggtcttggaagtggggatgttgggggttgagcaagagatagagatgatagagtgaggcacaggatctccccggcctctacattcaccacagggtgggggcaaacgacaggcaccgtgcaggcatccttagggagcaccaaaagaagccaaccaaagggcaaaagaacttggagggggaactcctggtttaggtccttctgagattcagggtgtgccaggagcccagcagccttccatttgctctgattacagggcatgaacctttaggaagacttcgcagtgagggtaagaggatgtaattcagagggtagagtggttacccagcatgcacgaagccctggggccaatcatagtgctagcaatccctgcactgaggaggtggagtcgagtcaggagcatcccaagttcaaggtcatcctcagagaaagcaagttcgaggccagcctgagctatgtgaacccttgtgccaaaaggagagaaccagaggaagccattttctcacggaaggcgcagatccacctcgagagcccacctctgtcaggagccactccagcaggggctgcagttggcctccgctctgcttccctgtctcccagggtccttgtcccaggctccaggccagggcccaccccaggtcccagctcccaggcatttattcacggctgtgctcctcacggctgtgcttctctgcccctatcctatagataccttctggatgaaccctcagtacctaatcaagctggaggaagaggatgaagatgatgagggtggggagaggggctgtaccttcctggtgggcctcatccagaagcatcggcggcgacagaggaagatgggcgaggatatgcacaccattggctttggcatctacgaggtgcgggcggagaacggggctgcgctctgccgtcccttcccttcccccagccccagccacagaggcatgacttggaataagacagaggacaggaaacttggccaagccaaagtaaagatgctagtgcagccagacttagctggcacaaggcctacacagctgtttgtgtttccaaggacctcctggtccttccctgagccccatagctaccctcccaggagttctgtgcttggaaaaggcctctgtgtccctattcacagcccatcccttagtcctggaattctggctagcccagcagactccaaagaataggaaagacttcatctagaacaggatattctagagcacaccaagtattgtgagggttaggctgagccaatagtccctaatagtcagagctccgccaagtctttggcctggatgggagagagcccaggacagggtaaagaggggtcattatgctcccccgaggtctgctggctgcagctctgctcttgcaaccttaccatccacgggaccttctctcattccaagccagagaaaagccatgcctgttcaactgcgccagagagcagccttgtcatgctcatctctcttcttcaagctgagattagcttgactccatgtccgggctatgctgcacagaacatggccttggttggcaggagatgagcacagcatggaagacctcaggggggctgcataggtgcctgagtacaagtagcaatttgctggactcctggttctgaaagcccacccccatcactccctcagccccatgtttagcaaggtcaaatgggtagcatgaacatggctttgggaaatggcaaactaccaagctgggcttttgcccaccaactatctccaagcacacttggaactcagattaggtatcagggagaagaaggttcaactgctgtgctcatcacgaggctgcttctgattggctgctgatctgagccccacccaccagcctgagaatggagtggggggaaaaaccatcagttgtgcagtatacatagtccctggactcccagtctctgaaatgaaaactgaggatgccagacttgaacagaataactcagaaatgcaaagtgagttgtgcccgctcacacatgcacccaggatgcagactagatgtggctggcctggcctgttggttcttcctccaacttcacccagcctcactttccctgagtgagaggtgggtgtgggcttcaacacagctggctggtgacctaaagcaagtcaccacatgtctccagccaccgcattgctaggtcctaagagggttttttcctctgatgtgtccaaagtactttgagttgcttgaagaataacttctgtgttgacctggtgcatagcactggagctgcagagaaaagccgcagcaaagtcacagagctggtgtgctcacactccccacgtctgaatcgggtctcctttgtttttcaggttccagaggaggtacgtctgctacatgttggcccccaaccccagggctccagctgccaacacaacttgggcttagtctgcctgaactcagggagcagcaggagcctgggaggggctggtggctcagggatgagcccttgtcccctatgagccccatggggatggttccagttctggatcccattggactaagctcaggagaaagtctcgatagcgctcataggtgcttcctgcctggccttagagaacccgtgtagtttggccatggtggcagcccgctgcccttagactgcaggaattcgtcatcaaggcccgtgtggctctgagaacaagcagggaggggagaatgaactgcacactgttttggacccaactcacaggctaagtgaccctggacacatgacatattctctctgagatttagtttccttttccaatataggcatgaactgagttacagaaggttacagttaacagtaatgagatgcataacagccaggtgactcaaaaagccaggtattaaatggccacaccaggtgccctgacctacccatgggcatcggcttccaccaatagacggttgagcttcattgaacactaccttctgagttgtgggtctaaccttgggtggcatctggtttaacagctggacccctttctctgcccccaaccttgtctttcatcagtgtgagaaacacaacacagaactgacctggctcctttgtcggggaggggcctctggtaccccaagaatcacctagagcaaggcagaggggagaggggagctcccatcacacctggtcatacctgagctccttaccatcatgtgttgccggggtggagatcttatggtcatgtgttgtctcatttaaaacaatccattgtccccattgtccccttgccttgtttctctgtgcaatcatcagctaacaggacagacgaatatccacttgggcaagaactttttcctcaccacccgggccagggagcggtcagataccttcatcaacctccgggaggtactcaaccgcttcaagctgcccccgggggagtacatcgtcgtcccctccaccttcgagccccacaaggatggcgatttctgcatccgcgtcttctcagagaagaaggccgactaccagtaggttctaccacctctccttgctcctggtcctggtctgcccttctctcctttttctgtgacactgacctacttaggtcagtaggataaatgaactggagcgctctaagggttctactcgaggaagcaaagggaaaaaaaaaaacatgcaggatgtgttaagttggaacagggcatctggggaagtgagtagtttgcagtacagtttcagggttcacccctaattacaatagttaatattttaatggcctgtgcatactctctatgagcccacactctaaataacccttgctttcccgggccatgtataagtgacaatgttgatggtcggcgtgtccagaccgttccctgtgctagtcgggaagcctctggtggaggcttttaggcagatatcacaagttcccaacattgtccgtgtggcctctactcacatcagtcactgtgtgagtcacttagccagcagacagaaccaaccctggacagtataactgaaaggaagatcactgaagggctatggggaccccagcactgatgtggggaccagggacaagatgggaaggatgggaacaaggatgctctagagaatcatggttgggaaaacctgtgccaaagacccaaaagccccatagattgtgtctgattgggtgggtacgggtgggtccccagccgtcacctcctgtgacaggaagtggcagtggcatttgcttcaaacaacacatgacagagaaagagtttcagtgcccaacagctatgaagcagtaaatgtcactagagtgtggctgtggctccctgccatgacaggctttcttgttttgttgaagtttgctgcagggaaggggctgttgggtcatctcatggcaggtgggaggggacctcggtgtgtcccgcttattctccactgatgagatggggacaagcccgaataccattgtgatggcactgctcttggtcaaaccctatcctgccctgctaaccacaagcctctcccggggaaatgtcagcccctctgcttgccccagggtgagctttctgcccttaaaagcggttgcccttttagatagaataggcaaccttctatctcctttcccacagcatgctgggtttaaacactgctgttgcgttttgtagggtgacttcagccttctaatagcaaattttccttctgtttccagagttgtggatgatgaaatcgaggccaacgttgaagaggtattccttccttacctctctaattctcctcatgctgatgggcataaaatacagcagaacaaaagcgtggcaagggcctgggtgcctcttagacctcgggaacaggatttgaaagcgaggctatagatagtcagtctcttgtccattaaagcccagtttatccacatgcagagggcgtgaggtcggcgggcaaggacaggactccaatgctgcattgagcagacttgttcaacctcacttttatcatccataaaatggactcaaaggatagcaagatttctcaagtttctaagggttctaagactggttcagtggtaaatcctgaagggcttttaggcatgtaactgaggaatttcacccaaggcctaatcttagcaaatccaagaagtaccaccaaatagaagaaggaagggcttttgctctctgtctctctgtctctctctgtctctctctgtgtctctctctgtctctctgtctctgtctctgtctctgtctctctctgtgtctctgtgtctctgtctctctctgtctctctctctctctctctctctgtctctctctctctctctccctctctctctctctcaggccctgaggtggctctttgattggatcatagctgctgaagcctggtgcatgtcctaagtacccagtcgaacaccaaacggtttgtcattgaccaaactgttccacagcattccactcggttcctgtcagagttgaccatacaaggtcgttttagttaaatattaaagatacttggaattgcaagaagttaaagcataacctcccctgccatgtggtttccactccctctcatgggctttagctaaaagaaaccaaacaaaacaaaaccttagctaggcacggtggtgcacacctgtaatctcagccctgaagagactgaaggatgaggagttcaaagcatccttgcctatgcagtgacctcaaggctaccccagactatttgagaccctgactcaaataaggaaaaaatcctcaaaggacaagtgtggtgacacatacctatcaccccagcacttgccgggtgagacaaggatgaggagttcaagaccatcctcaactacataaggagtatggggccaggctgcattatatgagatcttgtctcaaaaccaaacaaaatatttaactcttcaccctgccattcactgtaagcccaatgtccttagaattccagcctaaggagcaggaagactctggaaattggagagtggggggggggctgccattaaagggaaagggcaccttcaatcagatcaaatttctctttaatgagtttcctatttctgtgcctcaccttctagattgaagctaatgaggaggacattgacgatggtttcagaaggctgtttgttcagctggcaggagaggtaggtgtcaccaaaattctgctgacataaagaagtgattttcctggaggagacttcatttaagggggaaagaaagcaaactaagcaaaagcagatttttggtcattcctgagacccttagcccaacaccaagggatgtgacccttgctcacatcctctcaagccctctgctgactcccagggcctcacctggccctggctctgcttttccttgagactcttggctcactttgaggctgttttgttccctctgttctgtgccaactgagacatgaaacacaactcctggtcttgaccccataaacacacctgagatggacgggtcccattcctccagaatggaagcagtgcctaccaaagcaccactgtccttttcttaaaatagtcccccagcctacagtccctctacaaagccagtccgccctttcttccctgcaaccccagaagcaaagtgtccttctccttgtgtggctctctccagtgttaccatgaggcccatctcctgtctagccacagactcatcaaagggtgatgcaagctgtgtcaccccccaccccacccccatttctcaagggaagggtcctcagagaaacttagtctccactaactgaaccacacctgcccctctatacacaccctggacaaggttacaccaatcacacaaatacacctaagtgaacagaggtagctggctcacttctgaggagccctggcaaatgacctcagagaagggctgagccatggctggtcttaagcagtttcaggaagttgtagagggtagataagaccctgcaggaggggtggcgtgggagaattaggctgaggaagaccgtgaacgtgttccctgccatatagaaagggtgactaactccacccagcatgtgccctacattgtaacagtatgttaaatacagcctagggcactacttagggtaggctggggacagacaaaacatcagttggggcattcgcaaggtcaacaagactcatccaagatgttcactgcgggtcacccagctcccatgggagccataacgatggtcggctcctatgtccacaggatgcggagatctctgcctttgagctgcagaccatcttgagaagagttctagccaggcgtaagtgtcccctgcgcacatccctcatcctactcctatccccgcagacatgagggactccttgcttcaagcacacgtcagctgctacggctaagccagccctctctgctcctacatgagctgttgcctttgcactcccagcaccgggaagagtgggacagaggaggtgtgtgacgtaatggtacagagcaagggtttctgggtctagagatgacaggtcaaatccaaattcttctacttacaagctctctgagtaaatgacatcacacagatcacctgtctgactttttaacccttatctgcaaaacagacaccctacgtatgactccctcttcccagtggctggacattacgtaaaatctacctggtccagagcctgcatgctgtaaatggaaattcttgtaatgactagttggtgagaaaaggctaagtcagtgcagatgatgggcacagaggtcccagaagcttgtaggccaatctagcatacatggggcttaacaacagagaccctgtctcaaacaaggtaagggctgacacccaaggctgtcctatgactccacacatgtgccgtggtaccactcatctatactaatacacatgcatacacacctgtcatacacacattaccatcatacacacacacacacacacacacacacacacacacacacacacacacactcctcatgaagtctatgggggggggggtgtgactagagtctcagaccaccaatggcccaggactcacctagtaaagtgcagtaggttctaggtcctcagatttctcggtctgctgggacacagacacaactgtctgcagatggacagatggaaacagccaccttcctctctctgctcagagcctacaatgaacacatgtgctctctggctgcactcgaccacagacagttttccacctgtcagcatttaaaggttcagccatgatcaggttgggtagcacacacctccactatttatgaggcagaagtatgaatttgaagtctgcctgagcttgaaagcaaggctccgtccaaaaacaaaacaaaaacaaaacaaaacaaaacaaaacaaaaaaacccagccgagtaattttttaaattcctttacttgtttattttaatattaaagccctgtttgtccatggtagttatacagagaaagccagcaatgtaggattccctgtgctgccccattttgacagccaactaccacacctggccaaagctatccacagggctttggtagtggccggcacagaggaaggacgtgtctacctttgtagaaagttctgtcagatagtactggtccagaagctttactaacaggtctcttttgtcttttaggccaagatatcaagtcagatggcttcagcattgagacctgtaaaatcatggtggacatgctagatgtatcctttaatggctcagaacggagactagcccactcgactctgccttcataggctcagagtataacagacagcctactaggtcctcggctagaatccctggacatgcacccaccatcctgcccagagcagcctgggcagcttcttgaacagggttctcctgcttttccaaagtagagcttccctaacccatcgtgtgcctgatatgactgtgtctgtggcaaggttcccttctaaaaccatgtatggctagacacttctgttcattctagcacatggtggtgttgaggcagaaggatttccactttgaagccagcctgggctacatagcaagactgtctgaaaaaaaaaagttttccagacctgaagctgaaggcctgcctacgttgtcattctttctccttggtctagctccccctgggccacccacctgtccctgaagcagactaaccatgctccctcttgttactggttccctcagtaacagaacagttcaagtttctgtgacactatctgctggccacaaggcatgtacctacgacacagcagctcccttcacaagacaccttaaaaatacccaataattctcacggtcccagtcatctgtcatctcataacaaactgttggcaagatctggggtctccatcactcccttcccgctgcccttttgaggaaactcgtgagtacaaaaggcagaaggcagagccttctacaaaatgtctctgtgcatgtgttggaagtactgggagagccagccctcaggccaagcagatgccactgtacccagtgaccacatactccaggagctttccttgactgagggcaggaagatgggagtggcaagctggggctgaaggagttctacatcctctggacgaagattcagaaataccaagtagggtcctggggaccctggggtgggtagatcagtgttgggggatattccagacacagactttaaaatgtcactcctctggagggtgggggaacatttccaagggaattggactttatccagagtggaactcagaaggagtaaagacctggctacaaaaaacacacaaagcaagggctttgccaggaaggcagtcttagcctttcctttgcctgactaatgaccaggaatgaggccactgtcaacagtttcctggaaaggctgcctggcctcttgtagtttggctgtgtggccgttcgtatgtaaagcatagcatcggcctgtgctgacgggctaggcgatttggtgggcacattacaaagtcagcacatagaaaaaggcaacagctctagtaacacagttcccaacctgcgggtcacgacccggttggggtttgagtgaccctttcacaagggttgcatatcagatatttaccgttttgtaacagtagcaaaactacagttctaaagtagcaatgacaataattttatgttgggcgtcactgcaacatgaggaactgtgttaaagggtcacagcatcaggaaggttgagaaccacctcactactaacgattgaaagggagaggggtcctagtaaggccagcctagaggcggggagatggaagctcctcacagcttcacacacacctcacaggaacctccacagctgtgttgctttgggtcatggttctaatacgaattttgtgtgttccagaaaatttaccgggaaatcgatgttgacaggtctggaaccatgaactcctacgagatgcggaaagccttggaagaagcaggtaccacttcatggccgcacctccttacctgttttgtgttgagcctcgttctataccatacaacataaagctttgttggtgggtctgaagatgtagctcagaggtaggctcgggcctatcattcacaagaccctgggtcctgtccccagcacaaccaaagttagatgaaccaaaatttggttggtggtataaagcaggtcctggtctaaaacatcacaagcacatcttctcattcccctccaagagacagtgctcaaattaaatgtcgtcctggaagctctgcccttagcgtgctcctgttttatctgaaacagcctggcagagcaagacggcaaagtcagctctgagagaggtggggggagggggtgtctgtgtgtgtctgtgtgtgtgtgtgtgtgtgtgtgtgtgtgtgtgtgtgtgtgaacaagatctcctacagctgcaaggaaagctgcaaagtgcaatcaacatgcccagacagtgacaggcctgttaaagttccttttctgtttacaggaagaattagtattaattagtctgccacaatcagcctgccacctaaaatctaggaagaaactaatctcagatttgatttagaacttacacggttgttgtttcgtgttgataatcatggttatcaattaggagcagcatgaccattgcaaaaacaaaaacaaagaaacaaacaaacaaaaaaacagacaaaagctttatttgttagtgaggaaatagacaggctgtggaacagttcagaaatgaaagaagggactacatggcaaagttcaaccagccacactgcccatggacaaaagcaattatgggtgtaatttaaagagtcaaacaattcaggggagctgggagatagctcagtggttgacagtttttgctgctctcacagagagctgaccttggcagcccacaaccacctgtaactccagttctggaggaaccaacaccttcttctggcctctgcagacactgcatacaggtggtgcatatatagaaaagcaggtacatgcacataaaaaataaataaaaatcaatggggagagataaagagtgtcacattggttccacagcctgtgagcagagccagctagtgggtgtggtacacggcagagctaagcagtggggtctggtgctcagcagatgcctctttgttcactcgcctccaggtttcaagctgccctgtcaactccaccaagtcatcgttgcccggttttcagatgacgaactcatcatcgattttaacaactttgtccggtgtttggttcggctggaactgctattcagtacgtggctctttctgctccattcactcagaattaaggcctcgttcaccaggggcgaggtcactggatgtgtctgtctatgagttgggagtgaatttcccttttggtaaactggggaagcaggaggagtagtagatggtgtcatccaacaaaaatcagctgccaaatggggacaacgctgcaatctgcctttcctctcatttttcacgccccctgtcctccctccacagagatattcaagcagctggatcccgagaacactgggaagatacaactcaaccttctttctgtaagtcagcagctcacaccaaccctggctcctgggaaggctggtggaagatgtgtcagacaggctgtccctcgggtgacctgaacaggctgtccctagggtgacctgattcttttggaaattttgtttctgagttttttctggtctggtggggataagcctgtaaatggttgtaaagtcccatgatgcaccttgattttctatttctgaactacttgctgattctcctgcctaggaaaccacacctggctctctggtcccatgagctttgactggagcataagcaactggttaaactaagataacagggtagaccagatggctgaggaaagaagtgatcagcacttgagagaatgtgtttatagaatgaaatcctctgggtggaattcaggttgggttctgggaagacctgccattttagggcatacctacttgaagtatattttttgagacaaatacttccattatctctcctctttaacatgaaactaacagcaacaatacagttatcatatgccataataggcttaaagccatcataaaacacagatatttacattatgattcgtaacagtagcaaggacataattttatggttggggtcaccacccaaccctgtattaaagggttgcagcattaggaaggctgagaacccactgatctaaattaatgtggcaggaaacttcaccaaaaaacaaagcataggacatcctcttgtcatcctgctaacagaaggctcacactcacaaaagcaactgggtagcagagagcttgcttaatgtttacacagccacgggttcaagccccaccatggcagaaaaaaataaataaaagcagccgagactccaggaccacatgactccagaaggccacagaagaatgcagtgctgggtgggacggcatatccatgcttccccatgtcacacagaggagcagaatggcaagaagatggggcttagggtctaacaactctccttgaattttgaactctggtttaagccaacactcaaacagctgttcacggctctgtagtgcattgtgaaataccctcatccaagtggaaacattttagctagctacaaatgaccagttgctgaaagctacataatgttatatcacctaggaaatagcctgagcctgcgatttgaagacaagtcaatacaacaggaacatgaagcatgctgggttctagaaactagcctatttttcattcctgctggatagccaacgctggctcgcccagcccactccctgctcacacgtatgggcctgtctactctgaccagtccccttcctatttcctaaggaacaccttttgtccacccttcattcagcgtaccctccacagattcctgaagaccccttagcatgccaaggattagccatgtctacaaagtctcctcttaattatgctgtgattttcatgatttttcaacgtcagttgtgggttacatcactctggagagctgtgacaaagtcctgatgacttggtgtactccacaccgatttgggggtctgagagttcctgtcactccaatatagaaccgaggttaaagcctgtattttctggatatccacatctcaaaacttttatttttatttatttattttttgagataggatctcaaaaaattcctggccggcctggaattcttaatgtagaccaggctagcctcaaattcacagtactagtacagcctccctagtactggaattcaaggtatacaccaccataccagcccgaaacaaacctccgatgtgatgtgttgaggcaaaggcatgaaaatgctggttcatacattatttgaatgtcacccttcatatattcagtactactacaaccaccagtttaaaccacacaaatcatcgaactgttaaacgagacaccagaagttaggtagaatgaactgctagggcactaatgtcttagtcctgcgtaagctttcagattcaaccatcttccagcataacccaaagccatcttctataaagcctttcattttaacattggtccctgaataactggttcttttcttcacacagtggctgagttttacagtactctgacgttacatgcctgaagacgtctaacggaaaaaaaacagccaatgcctaaacttccaaacacttcatatctggaccttgaacttacgggaacatttacttaaatggatgattatacctgaagaatataaccgtctgagatagatgaattttcacttatcagaataaaagatttgtatatcattaaaccaaatgcaaatgaaatgcattaacccttgataagcttgaagctgtctgtctgtaaataggatatactttttacttctacacattttcctgttcatagcaatattaaatcaggaaggaatgcagagaggcattaaacaactgggcaaacaggaagtcaatctcagaggccacaaggcattggtgggaatatttttttaaaaaaatttaagttgcggtggtggcatctgccacagaagcctggggactgccgcttgccctgagaaaactgtaattatggtgatgcatcctgaagcagtttgatggagacatctaatgaatccaggagtcaggagtggtggcacacccctgcaaacaggagtctgagatagaggccaacctgggctacctagcaagaccctgtctcaaaaaaaaaaaaaatcagaaaggaaaggaggaagaagaaagaaagaaagaaagaaagaaagaaagaaagaaagaaagaaagaaagaaagaaaggaaggaaggaaggaaggaaggaaggaagagaaaggaagaaagaaggaaggaaagaaagaaggaaggaaagaaaagcatgcctccattatttggtctaacaagagatgttttttaaacagtcatgaacagcaagccgttcctaaactcaagtccttgaccatatttggccttacacgtttaagtcttacaaatagtgaatggtgacagcattataccccaagcaactgtagccttgcatcagagccaggaagatcatgataaaggacaaacaaactgttggctgcctcaaaattttatgttcgataaccccagggattgtgcctagagctggggaggacagagctcagatggtcttcttaaacaagctggcttcttgaacttgggaaaatgctagcaacattgcaagcatattgccttacctcctgccaaatgtactgttaataaagagttgccaatgcagtcacaccacaccttgtttttcttctgagtgtggccccatgggagggtttatgagcccacagggctacagcttggctctatttaaacaggtctgcagccctgaaaattcacacactgagaagacaccttacctataattaaactatgggactacacaatgttttaaaactctagttcagaaatcctggtcattcaaccagaaagggcagccctaatttcacctgcttgttagtctgtatcattgctggctctatcacttaggctaactcccatgcccgttctcagcaaggagctgagaaaatccaagtactaaatcacaaatctatgccaggtgatggtagcgcactcctttaatcccagcactcgggacaatctctgtgagttcgaggccagcctggtctacaaagctacacagagaaaacctgtctcaaaaaaaaaaaaaaaatcacaaatttaggggttatggctgtcgctagcgatccttgaagaacaataaaatgagaagaaagatgacctgatgggaaaatactgcccactcttttaaagcttaggggatagattttgtttctcaggagcaggggatatataacagagcttcacaaagtccacacagatctatgccttgaactccctgtccttctgcctccacatccacagtgggaattccagccccaggtcaagtagtagatggctttctcaaaggcgctagagtgggctgggaaggcttaagaggctggagagcatgaatgaggagcatgctcaggccatggtaagagcttcctctgttcaggactggggctttcaggatggagaggaacggattgtaccaggactacaggtgacaaggtagcattgtaggtgagggactgagatggagtaggattgaggaaggtgatagagtgtctgaagtaggaggccagagacccagctgcgggtgggggtgggagtgagagcagggaagctgagaggggagaagggtctcgggttaggtgtagaacaggcgtgcgggagagctggccactcccagatggtggaggctattctagacatcactggctggcaccatgcggccagccccacctgctgcattttttttctgcagatttttttatttgatttagaaacaagattggtttacatgacaatcccagttccctctccctcccctcctcccctacccccccaactaaaaccctacctatcacatttcctttctgctccccctagatgatgaggccttccatagggtgtcatcagagtctatcgtatcttttgggataggcctgggcctacccccgtgtgtcttggctcagggagtatccctctatgtggaatgggctcccaaagtccacacctgtgctagggataagtactgaactactacaggaggttccaaggtttcctcacaatcctggggtctggatcagtcccatgctagtttcccagctatcagtctggggagcaagagctcccccatgttcaggtcagctgtttctgtgggtttcaccagcctggtctggacccctttgctcttcactcttccttctctgcgtctgggttccagttcagttcggtgattagttgtgggtgtctgcttcgacttccaccagctgctagatgagagctatcgggtggcatataagtcagtcatcaatctcattatcaggggagggcatttaaggtaacctctcctctgttgcttagattgttagctggtgtcatctttgtaggtctccagacatttccctagtgtccaatttctctgtaaacctaaaatgtctccctctatcctgctgcatttttatctcaacggctgaccctgttgcctagtgtgctctttgtttcagttggggagggggggacaaggggagaccaggtccagttcccagaaccccatggcagccttacatggagccccattataacccttctgtaactccagtgccaggggatctggtgccctcttctgactgccataggtattgcatacatgcagtgccctagcatagaagcaggagaaacagccgtgcacataagataaagtctaaaataaaaattgagcaatgtccattttatagggagcaaataaactcccaagctttttgaccccgtaagaattgtcctagcctacacctcaccgccactcccctaaacctctgccttgattggcaaaccctgacctctcttggccctcagctcctcagccatgcatgctaagcacacacctgccctaccctgccccgtccttcccccaggacagtgctctaagctgtccctcctacacccacttctatgctccccaaatcacatctccacctaggaccatctagttcatagacagtcatccgccttctaatggggctaaggacacattacacccttgtgcctacttctaggaacaccttccagctccagcccacctttaattgcatttactgctccctctgcctcgagtccacacccccctagtttccttctgtctgttgcttttgtcaactgggactccagtcccatgataccacctccaaccaaggcttcacagcctattacatcaaagtcacactctcctcctcgcatggcccactgcccggcacttccttctccctcttgttgcacaaacctacacattctgctttcaaaatgactacagcagcaacacagagaacagggggaaaattccatgttaaataggaaatcatttgataaattacgaattttatacagccattgaatcttaacacacaatggcaagcaacaggatacagaactcttacagcatgctcccaattgtgtaagaaaaatccacagacaagaactacaaaacggtatgcctaactacagtgtccactgcctaactttaaacaagaattccaaaacaaagctatctttagagactgattagaatgtgcagagactggcatgttacaggtccagggcttaatcaccctatcttgggctaatcggaggctcctgaatagccattcctcgtccacctatatcagactaacatctgatgcctagttgataaaaactagtctatgaacctaaaatctaagaatgtcatcagatagacctgagacctataggagagagtccccatcttgctgtaactgcctctctgatgtacccaccaatttctttttaaattgccttgatttatgactttttttgctctactctataaagcttcatgaaactgcttccatgtgggaatgtggagtaacctggctccatgtttcctgcgctgtggtcattgaaattggccccataataaactatacctgattccctcaaaagctgtgttttttgagccaataacctttttctatactttcaagtattgccctcaggaagctttgatactttaataataaaacaggttaaaaaaaaaaaaaaactacaaaaagacttcttaggataaagcagcagaaaggtatcttgggcagacccgaccaaggtgtgctgcgaagagagcgcactatgccccagatctaatgcaagagggttactggggaagggagagagtctgggagcggggacatgacagagagatagacagaccgagaaaaacgatctggggaggccgaggcctttaaggaagcatgtgtccctaggcaactcttagcggctgggaaaaatgtgctgcacctggcggtggtgccaagtttacaagaataaaaacaaatggtaagattaaggaatatgcaacagacctccctggttccctctcctaatttccacatcttctttttttgtagattcacataattctttagcttactctatagcactttacacggtttctctcgacaactccttgggtttcactgtatgtatcagcagaccaggtctcatggaggtcaactgccttggcagttaattactgcattgcaagtctagttctaaaatccatgtcatctttgtttcctactgtaacatctcagacaattcagtggcttaacccaaatacccattatcccacacttgtacagactggggtccagcaggttctgtgactgcagcccacccccagctgtggaatggtctcccgacagatcagctttcctgcagggtgctctcaggtccacatggctgcaagcctgaggccttgtctccttgcaggttttcggtccagagtttttctcagtttctacactttctggttctcgacccttcatcttcaaaaataccccaagtgtgactgactatcccttcggtctcaggctcctgcctccccttttgcttttcaagggctcaagattacactgggcccacctggataatccaagctgatctccctatcgtgttatctgattaaggaatttagtctgtgccagactaactgcggaaggaaggcccactgagtttagaattttgcctgctatgcataatctctatatttaattcacgttgtcattctctctccattatctggaaggttatgttgttttccatctgctttccttgttagaattcagctttaaaaatgtctagagaaagtaaccactggctttgcattctatcttctgttacattatagttcaaaatggactctaaaacaactcattaacttgtttggcagtaaaataaaaatttttaaaaaaatcaatgtatatagctttatgaagagcgtgaaaaagacatgagagcattaaaacagcccattgcaagtctgttactatgatctccaagatctttttcaaaattacaaaattagaggctggacagatggcccagtggttaagagcacttattgctcttgtagaagaccagagctcagatcccatcaccgacatcaggtaattctacaaaccattttaactgaagctccaagggaactgacaccccctcccagcttccacggataaaacacacacacacacacacacacacacacacacacactcacacatctctctctctttctctctaaaaaagtaagatattatagccatccggactcatgaactgaaaagctgagtttttgttattaagaactacttctaaaaatacgacggtgaggaaatcttactacagttcatgtatatcagatcaagaggttcattatttctcagctgtgcaggagacagcctactggcttataacctataaccaaagatgtttatgacattaaaaggaaaactggtaagtggcttagagacaaaatttaatttcattacaatcattttaaaatcagctatgatcttgacaaatacaggtaaatctgtaacaaatctctaatttccaagatacaaaaagacaataaatatatattcaaattcaacctaaaaacaagattctaaatctaatttagattaggtagtattgtttagtttaagtatttcaaatatatgcataattcttcaaatgctacaggaactcatacaatagttattgctcactgacaagtagctaccagttcttcactgacgatactcaagtgtgcagccctggggactcccaaagcctgtgggtgctggggacagttggagatggtgccagatggcactggtcctttctggcaggacactggtacaggaacagtgccaaaaacaccctaagcaggacaagaagctgatttcccacagcccagtaaatggtcccatttcttggcaaaaccagacaggctgctgctggctgtggctgcaatgagcactttgtccagcacagagtggtgggggttcatcctctcaattccagatgctcatgtcctctgctaatggtgacttcttcaatccttcattttcttccaggacacattcttcattgctttcaagctacactgtcattaaagtaagtcttctgaaatttttttccagatgatagtatttcttctagcctattatttcctcagttactcaagtttcaggccaagctcctttgtcttggtttaattcttgggtatagctgcaagagagttttaaaacatatttacccgtgccatatgtatggaagctctacagtatttcaataaatacagacaggaatgtgacacaggaaagcactgagctgtggaaacacactggcctcctgagtacacagagctcacactttgcactgctcacactggctgctagctgaaagacctctgaaggtcacagggcccatcagctggaacaataccacagagcagcaacatgtaaactccaggcattaactcaacttgcagtttgctcaactccatagcaccctagggaagccaagctactgacaactacttgtaaacacctgtatgctccagggtttgggatgccttctgtcagaacaaagtcttaaaaaaaaaaaaaaaaaacacagcagggtctagtgaggtagcccaggctagcctcataattctcgtgtctcagcctcctaagtgctgagaccacagatgtaagccacattccttcagcctcatttacagggacatggcagtctgggtgggacctgagcctatcagaaacaaaaatgcctgcatcagcagccgtggggaagccaggtgaaaggctctggaattctgctggctgcgcttcccatgtcaagggtgaggagaggctatgtgagggtcacactagaagtcaaccctgaaaccacaccaatcccccttctctctcccagggacaaggaaacagaagggtggcgtggtgatttaagagaagacactcaccaatgcactttccagattcatggctgagccttgctaaaaacccaagatactaaaacatggcatgtggagcacacttctctagaagaaattgccagagaaccaagagtatctatctaagtttaggacgaaaactacaacctttctcccagtctgttacaatttcatgaccttctgagaattcaacagtctctctgcttccccttgagaacaatcctccatctcattaaccagggccatttccttactagggaattaaatttattcaaagaattctgttggacaacatggaaattatggttaaaaacatgtatattaattgaaaactggttagcagatttttttcatcacaaaataagttagctatgtaaggctatgcatctttgcctgacttagccatttcatagatataaatctgttatttaaagctaggttaggggctgggaacacagggctagcaagatggttcagcaggtaaggacactggctgccaagcttcgtgaaccttgctcaatctccaaactccccaactgtcttctgaacaccacacacttactgtggcacacacacacacatacatagtaaatgtttttaaaactccttgaaactcatgttctatactgcaaatatgcacaattagttattaatttgcaatagatgagctaggtaggtgagacatatctgtaaccctggcactcagaaggcaggaggattgagtttgaagctagcgtcagctacatagcaagactgcttcttcccctccccacaaaacgggaggaggcgctcatctaagcatggtgtgggaacaactataatcccagcacttgagagactaaggcatcatagagctggagagatggctcagcagatggtttcacaacaaatgctgctgtctggaaagcagcagttaagatacagggaatgacttaaaatggacatttgacagggaatcactgtcagaatccagaatgccaggtccctgggtcaaagtcacctgaaagactgagcagatgaactttagcagacaggtgtggcaggcttctacctggcagctatgtgacagacttgtctatgtgacagttgatgaaaacccaccagggcttcacatggacggcctcaccgtgagcacactgagctatgaaggcttcacatggacggcctcactgtgagcacactgagctcggaaggcttcacatggacggcctcactgtgtgcacactgagctatgaaggcttcacatggacggcctcactgtgagcacactgagctatgaaggcttcacatggacggcctcactgtgagcacactgagctatgaaggcttcacatggacggcctcactgtgagcacactgagctcggaaggcttcacatggacggcctcactgtgtgcacactgagctatgaaggcttcacatggacggcctcactgtgagcacactgagctcggaaggcttcacatggacggcctcactgtgagcacactgagctcggaaggcttcacatggacggcctcactgtgtgcacactgagctatgaaggcttcacatggacggcctcactgtgagcacactgagctatgaaggcttcacatggacggcctcactgtgagcacactgagctatgaaggcttcacatggacggcctcaccgtgagcacactgagctatgaaggcttcacatggacggcctcactgtgagcacactgagctcggaaggcttcacatggacggcctcactgtgagcacactgagctcggaaggcttcacatggacggcctcactgtgtgcacactgagctatgaaggcttcacatggacggcctcactgtgagcacactgagctatgaaggcttcacatggacggcctcactgtgagcacactgagctatgaaggcttcacatggacggcctcaccgtgagcacactgagctatgaaggcttcacatggacggcctcactgtgagcacactgagctcggaaggcttcacatggacggcctcactgtgtgcacactgagctatgaaggcttcacatggacggcctcactgtgagcacactgagctcggaaggcaggcgtctctagtctttcccaccatcggcttatccagcacagaaatgttccaactggatcagcagagacagaacccagtgccacgtggatgcgtcatctccaccctcttcccgtaagcctctttcctgttccttaccaacagcagatccgcatcttttccttcccgtctacctctacgcttcctcactctttcacacacccagcacacctccgtgaacacaggccacacataacaagagccaagcccatcaaagagcttgctttggatcttcctacttccattccccaagtgctggggatatgggcatgacccacggcaccgggcttaaacctatggaagagcctaacgcaaaaatcttggaaacacattattctggctttcaaacctattaatactttcctaagtatagtcagttgccctgtaaacgtggctgtgagtctaaattaaagacatcagaaacctaagctttatgtatttttttttaaagattttatgtgtctgagtgttttgcctgcatgcatatgcctgtaccatgtgtgtgcagtgagcaggcatctagaactagagtccatagatggttaagagctgccatagaggtgctgggaactgaacttgggtcctctgcgagagcagcaagtactcttagctgctgagccatctctccagcccaggatcacgtcttactaacaaaggcagtaaatcgcactggacctacacaacagttcatgcaaagctctgctttaccatacatggaacatggtcagtgttagagcgacttactcctagcaagttgcgtggaacatagccttccttgtcatggaggcgtgcccaccaccactcgatttcatcctcatcttctctgcggacgacggtcatgcaatccccttctctcatgagcagctcatcttcattctggggctcatagtcccacagtgcataaatgactcctttgttcatgatgcccatcttctcctgaactcctacagcagggacagaagggagcgaccgcacaggattcagctctcagattacaccactcctaagaactttaaacgctatcaacaataggaaaaggatactcactagagcgtcacgactacagtaagcattcaagaaataaatgtcccagcatgagacagaaactggaaacccagcagtgtttacagaacacagaacgatgccatgctacaaggcccaaaacaggcaccttctctgcatctcacagagcttgccttccccagaaaggaagccttctgctagcccaggaactaaaagaaaaactgcttgaatccaaggcattaaaaaggaaatgacgggcttgtcaactttcggcttacttctaagcataatgaccaaggagccctgtaacttcagtcttcaccagacacccagagcaaacagggaaactttcaaagagctctacagcaattcctagtacttttaagaaaaaggacaacatcatgtgttagaaagcagaacacagcaggttaatgagacagaaaagtctatatatggctactttctatacatggaaaatcagaattctggatgctgaaatcaacaaacagggcagaagaaaatcctcaaaaggccattgcccaggagttatttcatgactgtgagttaggtctagcttcctcattgtgtaccctaaacgtgaagggtggcacaaggctagagaaactagacaccctggcaccactggaagcaggcagagggaggtgagcggggcatggcaacaaggtttctgccattaattttcatttacctttatgtcttaaaaacacatgaaaatatctgcttgacttttgaacatgtttttcaactctgagctcccaaaaattagtagttagcctatgacaattagtgtatcaattaataactagcatgtgctgtatctcttgctctgggaaaaacaaaacaaaaaaactccaaagaaatgaaaggttctcttccaaaaaccaataaaaccttttaaaatgacatgaaaaacaggagaggacaaaagctggtagtgtcattaggtgggaaatcattcatgaagcttgtataagcccccaggtttctaccccaacaccacaaacaagactttaggacaaaacctcacacaaatgtaactctgcaaggttgtaaagcttcattttgtttttgtttgggatgggaatggaaagaaatcctagttacttataatacactcaaattagcaattcaagtcccagttttcaacagaatttccattaagaatgggggtgggagggagagatgctaagttaagagtaccagccactcttccagaggacctggggctcaattcccagcaccacccacatggaggctcacagccctctctaactctagttccaaaggacccaatgccctcttctggtctccaagagtactgcatgatggtggcgcataggctaaaagaaaatgtaatatgaaaataaattttacaaaagatccagctatcagagagatcaggttcttctccctaagtcaggagctgtgcccaggccatcatcagtgacccttcataatgtatcctcacccctgacatctgtgatataattcaggtaccaaaagagtctgaccaaaaagccttcatgtgtcttcttttttaaatccatgtctgtcatatgaatttacataatgttaatgtcaaagtactctattggtccaaagttgaaaacaaacaaaatgcaataagtttcaataatgaaatctaagcagctcgaagggctactaggtatcactcagtggtagagacctgccagcatgtttaaggccacaaaacaaacaaaatggagggagggagggagggagggagggaggaggagggagggagggagggaggagggagggagggagaagaaacacttaggaagatgacagggaacttgtgggctttaagaaccccctctcttctcaccaaggaacatggccaggcagagaggacaaagcctgtgtgtctgggaactgtgtgaacaattggtaaaaagctttggagggagggctcgggcctattttcagcatccagaattacgtagagcaaataacaaaatacttattaagcttggagctattccctagagacagaggggtgatgaagacagcagccaacacacctgatggcactggctacataccataaagaaactgggagcactgagtgtagccttcttccatctcctcacacttgtccgcagcagtctgcatgtcactgtaagtcattgcaaacacagctgctcctgactccaccaggaacttacacacttggacgttgttacaggacgcagcacaatgcaatggggtcctgggaagcaagacacagcacagttagaaacatttctccatgctgaacaacctccacttgctgagttaccccagaagaaagctcctcagtctcttacccattagcctcacaaacagctttttaaaaccagttcactcaagacagacgactgcagcatgagagaattacagctacaaaggaaagcatctgaagcactggagcacactggggcgaggagctgagcgctagtgagaagaaccaaggaaataaagtctctgcggtgatccaaaagaacagaataaagtagacttggctctgtctggaacccccaaccttataatcatttcttgtttgaattttagttttttatttcatgtgtttagatgctttacctacatctatgtatgtatacctcctgcatgcccacagaggctaaaagagggtgtcagatcccctggaactgcagttacgtagaaatgggtgtgaactacaatgtgggtgtcaggaagagaacccaggtcctctggaagaacaaacatccagtgctctcaaccactccagccctgagacctcatgattcctgtcagtttaaactagatgcctggatgccaatatttataccttttcaccatcaactttcaaggaatcaaccagcacatataggctacctatattctcttgaaactcaaaagtaaattttgactcaaactgccaattcaactctaagtagaaaaatgactgttaacaaactgtagagatgattcctgaaaatacagtcttaaaacaatcactgtaacacacacccacacacattattcaatctattttaggcaatgagttagcaggaacttgttaatattatagaaagaaaatctgtcatctcaaatctccaaactcagaagactgttacaaatcaaactctgaaatgcatatttctttacttttcttttcctccttcagtctggttcccttggatatatgctttcttcttgctttctctttttctgccccctcccacacacacacacacatttactctgtccccttttaaccacagagtgctgggaatcccaggtgcctaacatatgccagacaagggctccacaactaagttacatctcacctctggtttaggtaaaaggtttgtttgtttatttacagagaagatctcacttatataccttgtctggctttgaacttagagacccacctgcttctgcctcctgagtgctaggattacaggcgtgtgttaccacctataggtggatataattttaaaacaaagaaattcagaccctttatactccagacgactactattactgttttggtgaatctgactacagatctgtgtctgtgctcgcacacgcacgcacgcacgcacgcacgcacgcacgcacgcacgcacgcacgcacgcacgcacagtgtatattccagtgtgtgcatgcacacacacacacacagtgtatgttccagtgtatgcctctgtgcacagttgtgtttttgtgcacacatgagttcatgccaatgtcaaaggtcagctagacatcttcctctatcaatggaaccttccttctattctgagacagggttttcctctgagtctagagctcaccaattggctatgctggccggccagtgagctcagggatctgcctgtctctgcccgcccagcactagagttacagactgggaatccaaactcagggctcatacttgcagggcaggcacttcacctactacatcatctcctcagccttgtgttagacagatctgtttcctgtgctagtttctaagagtgaaaaattacatacaatctaaaatctcaagcaaggataatatgatacagtaagaatttgctcatgctaaatcaaaagagggtgtgtattaatatacacataaataaatacgtatttatacatataagaaggtgcacagaaggttctgaatttaatatgcagagaatgctccacacacacacacacaaaatgggaggaactgtattaaaatcttaatgtttacttgtagattatggaggtacaggttgtcttcctcttattttttattttgtttatttttccatagtggacacacactgctcttatatgtatttttaatgcaatcataatacctctccaagtattatttgtaacaaaaaatatctaataaaaaggaaagagtcttcatatatgatcacttggaatgataggttaattcaaatttgtaatttatacacatgagcatctgatattttaacattaaaagaaaaaattagttattaaagaaacatgagattaaactgtaatattttcagtcctttatagaaaaaaaatttcatattcctctacaaaaagagctttgcttctcttatggcttcactctccgaagtatcaagattggtaagtagcactgtccaccctgttcccctgcgatgtgactcatcactgtgtccacagtatccaccctgtatatgccacctacccattggtcacctgacaaccacctggccagtccccatactccagtgcctgggatctagtaaatcgtattttaactcagggcaattttattacagtacactatcactaaaattttaaatgccaccaggaagtggtggtacatgcctttaatcgcagcactcgggaagcagaggcaggcagatctctgtgagttcaaagccagcctggtctccagagcgagtgccaggacagccttcaaagctacacagaaaccctgcctcgaaaaacaaaaacgaaaaaaaattaaacgccatttgcttccagaaactgaacaaaatggctacaagaggacacagtatccctgcaaacaacagtacatggacatgaaggactccaacagcaatacagcaatgcctgcaacagactccgcagctgatgtctggctggagttagaagcaagacttaccacccatcactatctgctgcatttacattgacgccaaactggaccaggaacttcacaatctctgtgtggcctgcacacacagcgttatgaagagctgtgatgccctcgtcattgggtaggcttgggtcatcaacctgtcacagcaataaaaagggcaagagagtcagtcactccaatttcatgtcacatcaactgccaatactgactggttcttaggatcaagaaattttgctaacattttaaaaatcataactgaaacataaaggaatcaagaaaactatcaagaaaaatgctagaaataggacagacagcataaccaaattaagtaagtacttattaaaagaagggtttctttaaaaatcatagcatcagaaacaatatcctatagttagttaccctttttcttccttccaatatccagcacaatccagtttctaagtagacatcctatttgctatgagacgttgaagaagttcaactaaaaacattttagagttcagcatggcggcacatgcctgcaactcctggactcatgaagctgaggtaggagggtcaagcatttgaggcttacataccaagaccctatctcaaataacaacaacaataatagtaatagtaataataacagatttctgagtagcaaccacaactataactcaatactacagagcacaaattcacacagagcaactttcaggcaaaatgttcttcctgacaaagaagaacaccaaaatatttcaagtgcaaactgaactcctatattatcaaaaccttacaggtatactcttaaaataaccctgcctgcttcagagcatctcaacatttctctccacaactccacagtccccaagaagaaaatgtaaaaacaggcttgccctacactagctttctatttggagctttaaaacatgatacagagttatagtttagaaacttacctcataaataattctctgtacaagatcaaattctccctccaaagacgaatctaggagcaatgcaagagggttgaatttcaccctcattccatgagcaatcctctcggagccagttttacgcaagtttgttcttttgccctgtaaaggaaatgtgtgggaaattaagagagcaacaggagcagaggcagcactcagctgaactagtgaaaagaactactgttgggggaccggcctacagatccgcccgccggcccgccgccggcccgcccgcccgcccacctgcatactcgccatttagctcagactggcctggaacttgccaggtggcccaggctgactttgaacctgcaatcttcctgcctcagtctctccagccctgggatcataggagtgtgccattattaatgcctggctgtggagctcagagtaaactaaatctggtggcaagctgactggctttctgttgaggatcacaaccagacaagactttctctaaatcacttatctagtagtatcatgcagagagagcctcactcttaaattggccaatactcagaatcataacaactcacacacacaagtgattatttacttaatcctcattaaaaaccaaatcaccctatagcacagaaagggtgcacacagtcaaaaaacagcaggaccaggatttgaacctaggcaagtccttcccgttaaatatttcataacaaagcctttcctaaggcacaagcacattattaggctacataataaagacgattagttataactagatacactgagggagagttaggaagtcatattagtaaatcaggcttttatttggggctggagagatgactcagcagtttaagaagattggctgttcttccagaggacacaggttcaattcccagcccccacaaggatctgtaactccagtcccaaggggtctggcactctcttctcctggactccttgtgcactgggcatgcacacaatgcacatttatacaggttagcaagacaccccatatataaaatgaaaaataaaatcttaaagttgcactgctagaagaatcaaagcctggaaggcagcgacccagccaatgagcagttataccatctgcagatttcagagccaagcaagtgaaccacatgaaaccaggtattgtcaatccaccgttgcttccctagtgtgccttcagctagagaaagaacaacaaaggtggcctttacaggcataagaacaaaaatctttctttataaagaacctatgctctcgtgcatgcacacacgcataccaaaatatggcagtgtttctcataatgaatgttagagtatctataactcccaccctgagggggatttggtggcaaaggtctatatctcagctactccagaggcaaaaggtctgtccaggcaactgagaatccctgaaaataaaaagagaactgaatatatagctcagcatgagtgagtccaagtcctgtcaaaaaccaaaactactaagatccatttcatcccaaggggtcactagctaagaaggctaactagagaagaataaagccaccgtgataagcatcccgagggacggtctcctaaatgaacatgggacaccacattacttacaggaggcaaagacacctgcccagtgatttcgggcgggcgcatgcgtgcagagtcttcttcagacccctccggctccccagatggatatggagggggagggtatggtgggtattcttctaggtatacttcaagtaaatgaggggcctctgggtttgtgtcttctgtgctattctggagacttggactgctgtctgtgcctccttcaggcacatagtcaaggcctggagaaggtgctggcacatcgctgttctctgtaccggcactccccatatcctctagggacaacggttcaggaactgaagagcccacgtctttctctggctccacatgtaaatatggatttgggatttctactgggttctccgtgttgacagtcactgagctcggcgactttgttgggtatgatgggactgagatggtttccatggcagctatggtggtcctctgatacaaaagtttctggatatttggcccattagggccttctggttctgttatagagctccgtttctttaacggccttggggcattggacagtttcttccgcagggcttctaagtcagcatcactctggtttcggtaaggattagacaagaaaggcagcagtttcgttgggctgagtggtcgaggaatcctttcattttcatgactctcatgacctgaagaaacagactctgtctcgggttctggactgccaggcttgccctggctacaggaatagatgttctctgggtgttgctgtggattctgggcagcagctatcacaggcttgccatatactaatcagagaagacggaaaggaaaagccccagttagttgactcagcaaaaatggtaagaaaatggtaagtgaagtctcttcattccatagttactacattattcccctcacatacactcaatttcttaaaataacaaagacaaagcaagggtttcatctttgcataagcttcatacagaactgaaatgttcattcattataacatgcaccactgttttcacgaaacagcaagaaggaaaaacgtggacagttataagaaaacacaggctcgcatggcatcaagaaaaactggtaatctgcgcacatatccagactacgtttaaacatatccttcccatctcacacactattcaaatgtagatcagtgtgagaaattacactcatctcaccacttgtccttcccaaagacattcccctgaaacattccagttatgtcaaaattacctgatttccaaattattatattagcaatatttaccaaggattaatgaaaagaccaagaggtagtgcgtacgctgatgctttaacatgttatgatagctttgaaccacagttatatgcttatttcataactcaaagccatttctaatgaattaaattacggtcaattgtatcctagtcttataatcaatgagtcagaaaaaagcctcaagatccagactgagcatgtctaaaacaaactaattttatcacagtttcatacttacttagtggtggtattctcactcgaacaacttaaaacagaagagaacgttgcttttaaaaagcaagagacaatgtaattgtcccaccctccgtgtaccaagaatagtcgaataaatagtaaagatgtggccttctgataacacctgtgactctgttgtccccacatcagcaagttccttcagaactgagagccaattcatctgtgagggtcagttttcaactgtcaacttgccacaacctagagccaccattggagagaaccacagtcgaggaactgtctaggtcaggttgacttgtggccatgtctgtgaggattcttgttaattggtgtgggaggtccagcctactgtgtataattgctccctaggaacaggtcctgaactatggaagacagaagaaagtgagaacaagtgggcagggggctagtcatttctctccactcttgaatgtgaatacagtgtgaccagctgcttacatttctaactcaacttcttcaaaacgatacactataacctggaattataagccaaatgaagttctcctcctctgctgccttttgtggggggttttctatcaatcacagatatgaaatgggacatctgtaactactatagcagctgacatgtggcaggcactccaataaactcccaattaaccaaagctacagttaaaattcttagaacaacagcttcagcctaagagatctggcactttactgtctgctggcagcttggcataggacttaagcccaaaatctaaacaggtaaaaatgaaatcaagaatcttaccaatcaagggctaggtaagatggctgtgtaaaacaaaaaaagaagctcttgccacacaagcctgacaacctgacctctgtctctggatctcccaatggaaggagagaactgactcccaaaagcttcctctgatctctacatggacactaacacatgcatttactctttcaagtgtattcttgcacattctctcatcctcccccacctaaaaatacaaacagaaacagaaccttaccacttgaaaagtgggggcctctggggtgtgacttggtcagggcactctgcacagcctgttggaagttttttcctggcgcctgatgctgggtatacatggaatagattgagcttgtggccacagtctggggctttcggaaggctggagggaaggtgtccttggaaggctggggcgtaaagggccgaactgcagcagcaggtggactttcttgctttgatcctggagagaggacttggtcttggccgcctgaaggtgcacccggagacagcagcactcttgactgtggccctgctggcttgagcttagctcccatgcattgagcagtgattggcaattgctgagggtttccatcaggcttcatatcagtagctgactgactcgtttgtccaaaataaggcaaattaatttgttttggctttgtaggaacaggaggtggaactttagccacatttttatttgcagcctgtaacacatatgcacatacagcagggtgattaaaaatactgtacaaaattatacaaaatagcctagtcagctcacttcacaaatacaaacacagacatcagttctcgagtctccagctagctcaagggctaaagcacttgccacacaaaagcggactggagcttgaacttccagaacctgtgtaaatgctgagtggggctcacccgcaattccagtctgcaagctcaggtctagtgagactagccagatcagcaggctctgagtctgactgagagactccacttcaaagaataaggaagaagagcaactgaaaattcccaacaccaaccttggatctctacacagaatacacacatacatatagtcctgcacactagacacatactcatgaaaagtagacaaaatattgcttctacatcttagactcattaaagctttaaataagattaataagggactcatagtgatgtaatccagtcccccccccatgacttcctccctggtcttgcctcctcgatggacagaactctttactgacatttttcatatccatggatgtcatcgatacataagcattcttgttcatcagaatgtcacatacaatctaactgaaaccctatcctttggcagctaaagcaggaggaacacaagtttgcgatcagagtaaaatcaagtctcaaaaaaccattccaaaacaagcaattccagagttgtgtgcagtgcagaacgctgaaaacccacctaaacttgcagagttcccccacaggtgcactcatcctagtcactcaagattcgccatcatgaatttgacacagccttgcctctcaatttcttcatgggatttttttgttgtgttttcattctttgagacagatttttactctgtagtccagactgacttcaaatttaatgcaacccttctgcctcagcatctccagtgttgggaataaggcatgaaacaccatgttcacacaccagacttcaaagaaatacaatacctggacaacatgagtgctctctgcttcagtgtacttacacttgagagaatcacaaaacctgccacccagaagcaaatgtgcagccatccccaagaaggagagagtacacaatcgtatctacacaacaatgaaaataacagactcctcctgttatagtcctcatgtcccagatattggatttcttctcttctcccttgcaaacagtatttcaaaatcttttaaaatgcactagagaaacacatgaggtggtaacaagtgagataacgctgaatacctgagcatcccgcaagatgtcctcactgctctggtttttcctcagcgtcccaaaggagggtggagcagcacactggtccactgtgtcaaacatggaaaaggggcgtactttcttctctttctccctcagtgaaatctccccatcatcaactgaagacaaaggaaaacaccccaccttgatatccaagcttcttggaataaactactttttacccgtttctttctcctttatctctctgaacatcacacccactaagtgctttcatatttttattctaaattggtaaataaataaataaataaataacccaaacactacaatgctaatgtcttagttcctcagttaagtaagtgaattatacaaatgaactgcccctgggcttaatgagctaaaaaaaatgagctctctagaaaaagcacaaaaataccttttagagtcaaagcacaatgctcaggagtagtacaaacaaaccccaccttggtccagggcatccgcagtgttctgaggtacagaagagccttggctgggtaacaggtctgcattggaagggttccagtcagagccagctaggtgacttctagagcctaaaatgcagaaagcagccacaagtcactcacattctatagacatttcactgcttcggttgacttggctgctaagacttttctctacaaacagctttacagcttgggcacacagcctcccaacacatttatttagaaaacacctatgttagattttgtttcttcttttagattttccaccttattcaagcagttaaaaaaacaaacaaacaaacaaacaaaaaagccaaagctaaaaaaaagttggcctgaattagataagtcctagttcattattcttgactgtgtaagggagcatggtcattactcagaagacaatttccaatacagcagatcggaacacacaagacggatgtcacagataatgccttggtggtgggttagtaaatgtgtgcccacgaactccaacccagctttcgctatttggggtattcatttttttctcagcacttgggaggcagaggcaaagaatctctgtaaattcaaggccagtctggtctatcaatattgagagcttacctcaaaaacaacaataacaaattatatatgaagtattaattatggcaaaaaactagttattttattttcatgtaacaatggtaagaagaagaaaagtaatggttatctgaatgataagaatatttacactgtgcacttcctaaaaccctgccatttatcttccactgtgaaactctggcttgcacctctccatgaaccttaaagctacacagctgactaaagcaagaggcctctactcttcccatctttatgtctctaggtgttttcctttactccaaagtctgtcagcaagcattgctcacgactaagagctcacgaatcctcagcactgttccagaggattcacaactcccctctggaaaactggcattactgctgtctatacaatctcttcgcacagcatggaagacctcacgttatactagatcgaaatttccttcatgacaaggattattttctttcctgaggtaatgccccactgtataggtccagtttgtcctcaaaacacaatctccccacttcaacctctgcagaaagtgtcagacttaaagtgaatgtcacacatccagcaaggacatttctgaaataagtgcgattttagccagagttaaggttaaatcactagcaaagagtaaaggaatttgaggttttaaaggtgggtatgcaatatgaaggcaacttttaaaacactcagtcggaagacacggtgggcagggaagagctaaggtgaagaactgtagacagctcccttttacctttactttgcaaagcagccccagacctcatactgggcagggtctgtgtcttcagtggcccctctgctgactgcatggccaaagaaccatcgggcagggctggcttcaccagcagctcaggcctgcaggacacccgcggcatggtggatgactggatgtaggggcctacagcggccacacgacttggggctgacactgcttgctggggaagatttccatcaggtgaaaccttagttaaaaagcacagaccttttaatagtacatgttttactagatgaccaattcagaaaagaatgaaaatttcaaaatgagcagttttagaatttagccagagactataaaaattgacacaacagaaatactccacaacgatctctcctacaaccctgctgcaagtcttagaaagagaagctaagcaccacaggtaagggcgaaaggtaaaagtgacagatcatcttttgcagactcagcaatgtcctctctgaggacagctgtaaggactctgacaaagctgcttcccccttcccaggcccaagtccaggcagtccacccactcacccacccacccacccacccactcagccacacacccactcactcccactcactcactcacccattcactcaccacccacccactcaccgactcacccacccacccattcacccacccactcacccacccacccactcactcacccacccacccacccactcacccacccactcactcacccactcactcactcacccactcactcactcacccacatcacccactcacactcactcactccacccactcactcacccactcactcactcacccacccacccactcacccactcactcaatcactcacccactcactcactcacccactcactcacccactcacccactcactcactcactcactcacccactcactcactcacccacccactcactcacccacccacccactcacccactcactcaatcactcactcaccgggagattttctttttgctgcagcgctgccttcttcttccacagccggtccctgagctcattaactcgcttatccatgactgccacttctgagttgcgcttattcaaacactccctctgttgctgcagcttggcattctgctcctggttcagtttgttttttaactgaacaaagcagaaaggaaacacaaagataaccaaggaaaagaaagaaaagcccctccaggaggcaatcacatggttaactattacaaaatttctaaaaatgtaaggtgcttgcttccacctctccgctcaccccatcccctggtttaaacttaagcaacatctgtgcctgaccactggctgtggttatgcctcaaatttcctgtctgaggcatcttaaagtttattctggattcttggagtttaggcctcccacttccacccaccttaaggaaaaacagctaaagtccaaaagttatggtcacctctatggacactttgtatttctggagcggccacactgcactgggacagtggctgcggcatacctgcagttccttgtagagacggtcaagctcagccacagctgactggttgtcatggtgaccatcgaccctgccgttcttaagcatctctagctgccttgtaagttcctccacttttgacacagccagaactagctccctctgcttctgctggaacaagctattcatctgttcaatttcctccactaggatagagagaacgaccatggttgaaaataaaaatcagaatgaactacttgccaggcacccaagctttataatgaaccttgtagtaagcagacaactctttgggaatgtccttggaccagtctacttgtagaagaaacagaaatcgctaaatggctgcattactgtctagaacatttagggactctgaagaatttttacagtgaataatgtaaacattaaattctaaattttggaaatcaaatttctttaaaacttttcctctcaattttataacagtagatagaatgactaaatcactaaaactttattaataatatggcaatttaataatatggcaatttaataatttaataatataaacaaaaatccttatcttcatcacattcttgatcaggaaattaggaaaaaatataaattaaagatataattttaaaatcttacctaaacattcaatactaacttcaaccaagaggaacttacaacatcaaaattacagggaaacactttcttaaaaaattcctttaaatacgaaaacttattctcactatgaatccacataaacttcctgtgctgctctcattatggcaaaacagctttgaattcggcctccactgtctactgtgagccacataccaagcttcccgttgctcagtctcttctgctccacgtgtcccttcagggctctcactttcttaagcttggcttcctgactttcagctatttctttgagcctcttgagtttttcctgctctgcagcctgttgttgttggcgctgatcttgttgttttaaaaacttcaagcgttgctcctaagacagaaaaagaagcattcactgtggctgtcattttaaacaggcacactaccaatctcaatagaacctcacccagcccttgcacgctgagactagtgttccggtaacaggtctgctctccccacatgtcctgcatgctgtcacaatcacctgggcagtattcgaaacacgcagtccttggcccaccctagaagctcttggagagaagacccagaaatttgtattttaacccaagtggttcctgtatagcaagcaaccagtaatcctagaagtagtttcataactgcttataaaatagattgtgtatgtagtgtatatgtgagtatacacacgtgcatatgtgttatttgtgcaggcagaaaaagccagaggtcagcactgcacgtcttccttgatcaccttttgtgtgatgaattttggtcatattcagcccccaattcctctcagagatatcctctttccctacccagtcaacttggtgtctgtcccttaaaaaaaagagatttctttttaataatgtatttgtatatgtgtgggtatgtgcacaggaatgcaggtacctgcagaagctatgagatctatgccccagagctggagtcatgggctgtcacatgccacccgacatgagcattgggaatagaactcaggaagaagtcatgcttttgcctgctgagccttctctccactctaaagaatcaaatacagttcgtgctgctcttgtactcttggatgtgtgccttccactgaagggtggccaacctaccagggctcacacccttaaagaaaaactgacgcccctctgccagatgctatcagctggcaacatcccaccccatctctgccactgccagccagcagtggactgcatgcccacctatatatagagggtatgaattcaaattcaaattcgaacccaagctacaccatgatttctatgaggtcttacacctattatatggcttcaccaagaatacacatgcgtttcttcatctgtaacatgggaatgagcaaaaacaagtccttgttgctgtggcaaggattaaattagagaatataaatctctgagggtgtcttacatattacatactccataggcaggaacttagagaatataaatctctgagggtgtcttacatattacatactccatgggcaggaactgtgaagagccaagcagtaacacctttagaaaactgcagttgtggaatttaagatttatttattaagattttatttattaaaattactttgttaaaattttaaaccatcagttacaaaatctacaatcaaaagtaaccacctccaaatatgcctgaaatatgtaaattacatggaatttcaaagtgagggtctagagagtagagatttactctgcaataatcaactctttatataaaggtctgtccttcatctgtgatggcacatcagcttattctgagtttaggaaatgcaggatctcaggctccaaactttgaatcaaaaacccagttcttaactagatcccacactggacctagatgagtaggttcagttggagaagcaatatgccatggtgccaggtatcatacacaagtatcgatgcatgcagagtgagccagctctttggaacctattccctttggtgagatgctctgttcagccttggtgcatgggggaggagcttgatcctgtttcaacttgatatgccatgctttattgattcccaagagagaccttaccccatctgaatggagagggagaagaagtgtgtgggggtggggggcaggaggagaggagggaggggaaactgtgcttggtatgtaaaataaaaagaaatggatccacaggaatgcatgggaatgttacatgcaaagaacagagtacctgtgagaccagctcaaagacctagctaaaagactaaagctcaatgggcaccctgctgagtcatcatgtggctaccccaacttctggaagcttccaggcactaaaggactgataacttaagggtcctgagtgtgtagactcagggttgacaaggtagagcctgaagttgaaaccagcttgctgagttttctgttttaaatcagtcaatcaatcaatctttctcttccttctccctgctatcctgcacatgtatgggagaggagggcacctcatcataggaatgctggggtcacagacatagctaccaaatctggcttcatgggggttctgagatccaaactcagatcctcacactggacaacaagcatattacccactaaaccatttccttgggccctaattcgatgttttcttaagtaaagctttattggaatatgccatacacatctgtggctactaccaggcaaagctgaataactaccatggaggcagagctgcacacaaaggctaagacttttactgtggtgttcaaaagagccaactatgctggcaactgtggcagattctaagcctatggcagcagcagcagagagactagttttgatagtaactgagggcaatttttcttattcaaggccaaggctaagattttgaataaaacacctttttcccccttcactggggccaagcagaaggcaacagtgacagcttgagcaaatgttcaagttgttcctatcacagcccatgtgagctctgggcttatagctttcctttctctgactcccagacagggcaatcagcctttatcaaaatcaaggatcaggtaagacacagtgatgagagcctataatcccagctctttgggagccaaaggcagggaaatcacttgggtccaagagtttgagaccaggtaacagaaacagacacctaactcaaaaagaaaaaagaatagtaaccaggtaacagagacagacacctaactcaaaaagaaaaaagaatagtaacgacaattaggtcaggaaaatcctaaactaaaatgatacaatgatttctggaaaatgctgaagaaagtcacacacacagcgggtaacttgggggtgatgacatcagttcctatgtgagagaggcagcggccttaataagcagagtagactgcacagttccaacaaagacatgaacagcagtagacagtgaggtcagtgaagacactaccttagtagccagcatttgttgttgggcctcaatctgctgctgctgacgagatgccatttcctgaagttcagcaagcgtcagatccatcctgggactattaacctacaaatggaaacacactgccatcttccgtattatgttcacagactccaatcaaaggccaacttaaaagctccctctaaactaatcataacaaagttatttggatattaattttactttaatatattcactgaattgacttattaagatgtaaaacatactaacagaggtcaataatcttttaagttgtcgattttaaactaaacagtttgctcagcaacacaaacagaattcagagttactttctcctgtgattaatttatgttaggccagtagactgtggttgcataagcacagtaaccagggtgtccacagcaaacctagaacgtagtcatcaaaacatgatttcaccataaatcagcactggatggcctagtagtgcacgcttgaaaccccagcattggggacacgaggcaagagttaactttccaatctccaaaaacagtctaaagtctggtatgatacacctgtaatcccagcactcaagatccaggggcaggaggatggtcacaagttcaagactagcctgatctatatacaaggaggcccttgaggaagacgagggctacacagtaagaccctgactcaaaaataaataaataaataaataaataaataaataaatggcaatttgttgcatctccattctacttacataaagctttctttgggaaagtaaacactaatggaaggattgtatgttaggtcacatttagaaataccctgctattgactaaaactacttctattgtcttccatcagtcttcatcaaagtaagacaactaattgtaaatcagagaacaaaacaggaagcacctcagggattgtaaagcaggtgctttagagacctgtaaaggtctaaagcagagtgagataactcaggaaatctagcataatattcaaattctgggctctgaaaagaacaccttcaaaggtatactaagatgttcatatacaacagcaagatcattaattattaattttccatttttctagaagtgattacagtaacaaataaaatcaccaaataattcctggaacttgctaaacatttattttgttgtgatttatggtatattcagcagctagcttcttaagagtaacagccataaaaaatcatggaaatacctatgaaaatatttaagggctgtagagatggctcagtggttaagaacacataatgtttttgcaaaggacccaagttcaattcccagcacccacagcaagcagctcacaatggcctgtaactccagctccaggtacccctctgacccagtccccacaaagaagtaacaataattaattttgttctaaaatggttaaaaaaaaaaagaagaagaagaagcctttaaaaggtggtcatccactgaataagaaaacaacaatgagatttaaactttacaaacatatcactgtggcatacacacacacacacacacacacacacacacacacacacacacacacacacacacacacacacttactccattctcctttctccgatgctctccgggaatttttacaccatttctttttacacttggatcttgggatcttggaccactcactgaaaacagattaagaaactaagcattaacattacagctgatgtttgccaccaaacccaatgagctatttgtttccatggacccacaggatggaataagagaactggctccttaaaattttcctctgacctcaacatacacaccacaagagtacacacacaccatgttatgatcacacacacacccctatatatgtatacatacgtaacttaaatatatataatttttttaatttaagcaggctggagtatctggagatagctaagtaggagagtgctttcctggcatgtataggatgctagttcaataaaagaaataactgaaaatgcagtcagtccacctctgtattcattaacaggaaaaaaacaaaaaaaaaaacaaaaaacctatacaagaaggaagtagtttaaagacagaatcagtggttattttgaaaactgcccttagctttccttttaaaaatccagcatgtttagaaatacagagtaatcctgtttcaacccctggcttcccaattccccagacagaatgcaaatgcatctgcagcttaaaggacgggccacattctcagtgtctcagccacttgcagcccagtctccacttgaatttattggaacattctctggaaattcataagtatgctatgaggtatatccttattaatttatgaaaatatttccatttttattgatttaagaaagtctaactaaaaactaatgactactctgcttttttgaccagaaagagtctttcaaatcaaaacatgtattttggcattactcaatgaacaataaaaggaataaatttaaactaatacatatatgaaatatcaacaaagataactagataactttttaaatgtgttaaactcatacccatactttccagaaattaaaacaatcactacaattacctgagaaattttaagacaaacatttctttaaatcaagtatctattatacctatcagaaaacttagaacaaattcttatgtcaataaacatataactatgactagctagcctcagagccaagcattatactcaatatataactctaatgctagcttttaaatgctatttgactttataataaaataacctgaataatctattatagtatctctgtaagaaaaataattttctatagtaaataattgcattattttctatctcagggaaaacaattcaactagattttatttgttgccagttacataattagagtaaagagaagtcttaaaataattccaaacacattgtgtatcacagtcttagttggaggctgtattatcattctcctagtccttagcagcctgaactaaacagggaagttgaagtctgcctaccgcagactgggaagccatctggctctctaacagtctaaacactgtgtggcactggtgtttgcaacaatgtgcaaacagctcctttgtcttagttaacactttatttctcacattacagatgctccaaaactgcttaacacactattgggagacagactatttaataattcacccagtgttgcattcagcaagacatttgaactgggaggtggatagccaaattccatcttactagaactcagaatgcagacagtaatgtaaatacagaacaaaataaagacaatgcaaatgtgtttttatgtatatttaaaataaaattacaaacaccagggatactgaaagtcagcctggtccggcaattcaggttttttctcttggccctgccataggtgtgtggcctgacaagtcacttaaccctaagtatcagtacttctcatctgtagagtagaaggagccaaactaagtcaattctgacccctgacactaatcatgtttaatggtgaagtactatgtgggcacttggattaaaataacagcaaataatgaaactgggatgttaaaactatccactcattaagatgctatctacattcttactgccaagaaaactgcccttcactttccttttaaaatcccagcatgtttggaaatacagagtaatcctgtttcaacccctggcttcccaattccccagactgaatgcaaattcatctgcatcttaaaagacatgccacattctcagtgtctcagccacttgcagcccacagtctccacttgtattactgtctgtcctttcctgtcctatagcaactcaggtcacaaccatcccattctttatgccctccaggtctgccttcattctggacccacccacccaagaaatcatctaagttatgttgccaagttgtttctaaatcaggctccttttcatggtgggatctgaaaaaccaatcactggaagcagtctacatctgagatctcacatttcgtcactctactttctgacactcatttctcctctcactacgtttgtttggtatctattatgaggttcagtcactggatgcaatctacactttccccatgagcccatcctctcgttaacccaccccactgcgatggtgggttagtgtttactaccaacctgacaatatctagaaacacccatggactaagcccctgggtaagcctgggggagagggcagggagcagctgaccaggttaattagggcttgagacctgctcactgcagtggccccattccctgggttagcaacctgaaatgtgcataaaagaggaagtgaaataagcacacggattcatgatctggcttcctgactgaatgtgaggtgaccagctgcttcaagctcccactggtctcacttcctgccaaacacactgtatgcaccccttcacctgtgagccagaataaacctccctcccctaaattgtttctgtcaaggtattttatcacagccacaggaaaagtcactagaacaccgccagcttagacagtaccttgccaaacactaccaccaccactgaacacccactaagtctgtcgggcaaaacccaactctaggccagtctcttccatgacaaccccctgagcttcggagcactgggcaggaaaccacaggtgtccgtccagtctctcctcaggcagccccaatgcttgcagcagcctacttctccagtacccaggctctcaatctgtctacccaccatcacgtccgcatgactttatcgccatccccaaagacaatacacattttcagacgagaaacacctcaacttgcacccacagacgcccggatttgtgtgtgtgtgtgtgtgtgtgtgtgtgtgtgtgtgtgtgtgtgtgtgtgtatgtgtgtatgtgtgtatgtgtgtatgtgtgtatgtgtgtgtgagagagatttactctctttcctgccaacgtgatctcggaggagaacctcaggaggagacatccattttcagggacttggctgcatctagtcagcattcctcctctgtctattttcaacttgttgctttacagactccttcctaccatattaaaaactacagtgaaacctttctcttcttcaagcaaatcatctctttcctccccactctcagtcaagacagactaagaaaactgccccattgctctgatttcctagcttcccttcacctctctaatttcctggcttctcattgtatgcctctcccaactattacaattcacaaaataaaagcctcaacactagttatgatttatagaatattatgtaccaatatccctgttaggggggcgttcgtgacgaagaaagaaacgaacttcattcctttgacttccaagtcgttgaagaacatcaaacattcgttcattatcagcaactggacgttctaaaagaaaaaaaaacaattatttatctacaggtaatagaaagcaaatatacccttgacataaactatgtcacaaatataggaaatacttggtattttgcataatctttgtcttttgttaatagaactcagaaatatggtatgtcacagactttccatacaatcactgtcaagtcaggataaagtaacagaaactatgccagttgtcagggtctaattcagtggcgccttaatgtctaccagcatgccatttaacttctgagggtctcaatgcttggtgtgatccactctcactaatactaatgttctatgtgcctctaaatatatgaagaaaaaattaaaagcaactttctaaacggcctcagctcaagttttagtttaaagtctttaatacgggttatttccctggatgagctgagagggtggtatgcaggtgtgtacttacatgtgactccatgtgtacacatgtggaggctaacatcaggatgtctttttacatcactttccactttccttacttttttgaaacagggtctcttcactgaacttgaatttttgccattttggctaagctgactagccagtgagtccctgggatcctcctgtctgaactcccattactggagttatagagccctcagcaataaccggttctgtgcgtgttggggaaacaaacttgggcccatgctgtatgcagcactttacacattgggcaaacttcccagacccaatatttgtaaattatgtttgtaactaatgttaagagtgaaacttattcatttgcaattatttcaatgagaagctatcctgcccttttgtagcaagaccaccaactttcataacttttctagaaacaagcaaaaagacacagctaaatactttcaggtgggagctttggtggaaacaatgttattatttaaaaaacaaaacacttcttactttgggaaaggaagctggatttaacaacccaatgaactagttgcaaggcaagtgcataaactcagttctcaatgacatcagtataatttgtataagaatgctgaaatgtcctatgaaaactatacttttatcattaatcaaagacaccaccttctcaatgccttaaagcaacgacgtggacagagacagggcagtcaagcactcagcagccaattctgtgacttaacccgaacttaatctgcttggttggaacaaacaacatgccgtcctggttctactcccagtgacagtgatgcacgtaactactttctataaccatacaaatctgcagtgccccacagaaggggtcctgaatagttgggcactggcactcatctgtgtccccacagaaggggtcctgagtagttgggcactagcactcatctgtgtccccacagaaggggtcttgagtagttgggcactagcactcatctgtgttcccggtaccctgcctctggaggatggaacacacccatctactccacttactgctgcggccctcacagcactgtaagggacatcagctgacacctgcttctctaggactgagatatctgaaagcaggaaatttccatctctgtatccctcaaaatctagtacactagcatctaagaagtgatatccacacaaatgcatgagcagacagaaaggagaaaaaggaaggtgtggagggaagaagagaggctttagtatttagagagtgaagcaacagaagacacttaaacctttgggataagaatggattcctttatttattttttcagttctgggatcaaaggcttgcactagcaagttttcaccacctctgcttcttgagtgtggctgcagtgcgaccagctccctcaagtgcctactgctgtgatggatgtccaccatgatggacgacaacctgaacttaagttgcttcagagtattttataccatagcaacaggaaaataagataatcctaacatcaaagttgaagggaagaaaacgaccaggagaaagagaagagaagaatgcctcacatttctaattaaggaaatctttacagggtttctctgtgtatccctgactgtcctacagctctctctgcagaccaggctggcctcagactcagagatctgcctgtctctgcctcctagatactgggagtaaaggtgtgtgccccaatgcccagcaaggaaagcctgaacatacaaaacaaacaaaatcaaaactaacaactgctgagcaccaaataataccccagaaacttccacctagcacattccaacacatctgtcatctgccctatgacctatgaccaccaacacttattcaatgacttccttctgttgcaggaaaagagaagaactgaagactttgtcaccaaaagttggagcaatattacctcctaacaagtgttcccacagtgccaatcctagaacccaaaagcaacagaagacagtagaactcagacagaaagtcaggtccataccagagccacaccacacttcagccaaatggcagtcgctctcgccaggctctttgcacagatccaccacatctctgcagactgtctccggggtaacaggaacttctgtgaagtgctgctcgctgttactgaggtacactgtcaggaacatctgaaacacagggaaaccatcacctgtcatgcctgcccgggtagcattcatttatttcctttaggttcctgccctgaaagaaaatggaggtggttggctaggcacaaagtaccagggtccctgtccttccccagacactgccggctgaaggagaaaccccacaggacagccacagacagcctccagagagaaggacaaagcaattctttttctgccagtttcatttgtactatttgtttaaacaaaaacttaagctagaccaagacatcaaatagatcttttcataaatcctttcacagctaaagaatgccatacatgccagatatgcttgtagtctaagctactcaggaagctgaggcaggagaattgctaagtttgggaattctggactgtaagttcggcttcaatgtgatgatctctcaggaggaaagttacacatgtatacacacctgtgcacttctttttggaaggatatataaaaatatgttaagtacctattctgatggtgggagataagaaacaggagccagatcatagacaaagacttattcttatagcatgtgcatgtattaactactcccaaaaaatttaaactaaaatgtttcaatcaaatccaatacctactctaaagtatgagatttcactaacaagtagaaattagccagtattccaaaaacctacctgatcttgtatataaattcagtccaacagataattaaaacttactgaaaatctttctcctagtaaaaaataaacatcttaaaaagcattgctaccaaagtatgcctattcaattacttaaaaaaattgttaattcctgatgctaaagaaaccaacaagctgcaaataaatgtttgatggcaatgcaagtcagaagaccctgtccatccaatgccatgaccacctactccatgtgaatgggtgcttatcagtatggagaacaacccctgtaagggttaccccactttcacttggaatgaagaaggaatgcacaaactacaggaacttgaaaaacagtagatcaggatattgtctttcagacatgctgaccactaaaaagtatggggttagtcgggcaatggtggtgcacaactttaatcccagcactcaagaggcagagacaggtgatctctgagttcgagctcagcctggtatccagagcaagttccaggacagtcaaggctacacagagaaaccctgtcttgaacaaacaaacaaacaccctttctcgaacaaccaaagtatggggtttatgactacaggaaaaaaaaaaaaaagcagagtgaatagaacctacactctggtcacagtgacacagtaccatttgattacagggtttgccaaatgtcacctgaccaccctgcaggctaacacttctctggccatcatcccagtgagaaagctgcactaggctctttgtgaacgggcaacagtgaggagggacagtgacagaacaggttcagacatcacagtgggcaccagaagattaggaagcacctgggctctgctcctcagtatgctagagcctgtttccctgggaaggtcacgtccactttctgcaaatgcatctcctaacttacataaacacctttcacatacaaagtaatccagaagcagcagaagtggattctgctaaaatagtgaatagatcattttataaaggaggaatgctgtcaagattcctagtgtgaactgagtgtgttcaagctaattatctggggctctgtgcattctggtgactgtgcctcatgaagatgtggagtggaaagcctcaactaaccaacaaggcggcacatgagctcctgacacacagcaccttgaaaacactgggaaagctaaagattaaccaagctcgaagaatgctactcttggtgctgggccagaaaccccagaacacctaacatagtggcaaagtattaagtagtacttctccacactcccaccacaccaaaactctctgaagttgacagtttcaaaagtaggaactgtcttcactgtaagcatgagacttgaagccctttattaaattatagtaacaccagacagaaaggcatgccctaaacagcgcaccagcaaataagcactgttacatagcagcccctctgtgtgcttccgtcttgcaggcttctatcacaggcattagccactggacttacaccaactatcagacagacagaacaggtattattttctctgtctcgatgaagaaaggctcagagcagtggtctccttggctactgaagcaaggtcagcggacaactccttctgacccatcccctgggtcagaagcacagacccttcaagctgtctgtgctctcggcaggagaacgtgagcaagtcctccacttagccagccacccaaattaacagcagtctaccctgttactttctagctagctagtctagctctgttatttatgtaagaacataactactacaagaatatgagagaaatgctcctccctgggtacctgccccacggagttaacactggtgtgaatggcaagtgcctgagccaacacccttcttgtccataaagactagctgtggtgatcccatgcctgtgctgaagtcctccatgctggaccagcaatggcattttgttggatggaattagaaccccacattgtgctacagagtgccttaggaaaggtacttccctgaaacattcattttttttcaagatttatttattatgtatacagcattctgcctgcaggccagaagagggcaccagatcttgttatagatggttgtgagccaccatgtggttgctgggaactgaactcgggacctctggaaaaacagccagtgctcttaaccgctgagccatcatctctcctgcccaacactcttatctttaaaatgagttttatgttctctaagaactgccatttaattaggtgccacagcaaaagccaacactgacagatcacaaacaaaaccatgtgtcctgcccataccaacaacactgccaccattaatttcacaactcctcacgtcttctacccatggcctctgctctaccggagacctccaggctgttacacagcaggccaggtctgcgcccacctctgagccttccttgcactcgctgttcggttgagcatgctcataaacagcctcccttctcatctacacactggccaccccctcagtaacaatcccctgaccaccccaccgaaaatgccaacatcaaacacacacacacacaccagcccctgcctctgcacaggctctgtactcgacagccacgagcttaccattcactacaaacctgagtgtcgtgcagtcagggctgtcgttgttagcctgtcttcagcacgtaacatgcactaaggctgaagacggcactgcgctttatgttaacaacacactgacacacaaagactaagttaaagttcacaagtcacacagctatgaaatggcgaagtcaagatccaaaccaaggctggcttcctccagagacttcgctctcccaatagcacacaagggacccacttgttactgacactatttctgcctttcagagacacctttttgctcacaacacaccatcttaccactggcttttttcagttaagttctattcaggtaccactaaatggtcttgcatgtagttatatagcaaactataggctcgacaccctcagttatacccggccacggccattctacttctgattcaatgtcctttccattcattcaacacttacagatgatctatggtctggactgaaatgtagaacaagctgatgaaatagttaacactgaacaaaatgcagagggagggaagacaagggggacacggaagaacacaaaatctatgtggaaaagcatccccaaagagaaccagaggctagcgaactctggcacaaggtacaggtgagacagaggaggcagctgtgagggaacaaaacgccagctgggagggctcttaagcaggcagccactgtctaaaagaaatgaggcacagcttagctaaggttgggcaagtatgccacacagagaacaaggccccaagaggcaacacttggtcacatctgttgaagatgtggtctctgtggagaaaggaagaagaaaagataacagaagcaagcagaaaccagcatgcaagtctttacaggaagggaactgagactcctccattcctaacaagtcctggatagtacacaactggctgagaaacctaccaagaaccactatgaaaggccaacacaaggaaacttggattgtaatttatgagacccctgggaggcaaataaaataataataataatataataataataataataataataataataataataataatagattcatggttgccaagggcctcaggaagatagagaattgcctctttctcctcttagaagatgtgagaattaaatgacaaaatgaagtgaccacacctttgaaacattcttttaaaatgtctgaacatttccttatcctcagtattcaaccaagttataaagggtaaatatcacttcaatctctaaacttaaaacctaactacaatgagggattgtaatgtggcagcctatattttaaatgctataaggagaatgaaacgcagacttgtttccaagaactatcagttcttttctccttgtgttacttggagaggtggggaaggcaggagtgagggcagattaaactacctgtgtgaggcatgacagagaaggccgaggacacgccagtgcttcacgctgccacctccttctaactgctttataaatggctctcctaaatgagccaagtattctcacaactacgatttaattcccagaaacaaaatgaagcagttactgtttcattcagatcacgagacttttaaatcacatgatgaaaaatcaaacaaatttcaaagttagatgtggtagcattcacacttgggaaatggaggcaggagaattttaagttccaagctaattattatattgttgaaatttttaaaataatttacagcttgaaagcatgccaattattgcttgtttctgtctcttacaatgatcaatctcagaggggaaacacacaagaaaagataaaatgcaaccacaggaacactgcccagtaatttgtgccaaagccgttttttatctacatggaactgtcagaaacacaagggcacagataatattcagttaaaaagaacaggtcacagacttagtttaaagctccattgtgatagaacttgcagtcactgtaattaatattctgtcactgacataaggatgcctcgttttcaaagagaagttatttcagactgaagtaggagcaatctttccaagaagacacactagggcacgaaagaaatttactgagtcagaggtttaaggttattcacttgagaccgggcattggtggtgcacgcctttaatcccagcacttgggaggcagaggcaggctgatctctgtgagttcgaggccagcctgatctccagagcgagtgccaggataggctccaaagctacacagagaaaccctgtctcgaaaaaccaaaaaaaaaaaaaaaaaaaattaataaaaaagattattcacttgaattctaaattatttatttacttgtttaattattggaggtggcatacacacatatcactgtatgtgtggagaccaaaagacaagctgcaggtattggttttctcttcccacaatatggcttcttgggatcaaactcaggttgtcagggtagtgacaaggaccttactcactgacccaccccagcggccctagtcatctcggtgaagtcagagggggagaaaactggagtttgctgtaacagacaggaagtagaggctgaccactacaccttcagagctgccatctgtgaaaacgcactcacccgaggcttacctacaggaggtcaggcgtgcaagaagaaaaacctgcccttcaaagaaaacgagccaactaaaaagaacaaaactccttcaatttcctaacccataagaaacttcccaaaaactgctaggaacactaagccaatagtgagattcagaggaaagcagaggggtttcatacacaaggagcctgctggcctttgctggctggtaacataacgcttctctatacaggcagcttagcagctgcttctaaaaccaactttccgaaaggcgtcttatcaaagtcagtcactccaaagcaccccgactccttgctaagttcatatactgagagcttatcgagcaaacacagtgcaagtcataggaatacagggatgaaaactgccctcttcagggcagaatgaaaggattaataataggccaaccaactgtggaaggtagagaataaggagtgttagatgggagagacggctcagaggttaaagcgctggctgttcttcctgatttcattcccaggacccacatagcagctcacagctgtctaactccagtccctgcttgctttggccttctatgggcactacacgcacacggtacacagacacacatctaagcaaaacacccatatacataaaaataataaataaaatgtttatttttttaaagggatatggagtgaggctttattcctggggaagtcattagagcagatttgcatattttgatttcagataattccaattcaattataggaaataaaggttgagtattccttacccaaaaggcttaggactacaaatgttttagaacttgctttgtttctgtattttggggtatttgaaaatacccatgaaaatcttattattaaagagactcaagtacaaacatgaaattcatgtgttttatatacacctatatatacagcatacaggttgcctttttaaacgtgatgcttcacatgaagtcaggtgtgaaatttactactcattttgtcctgtccactcaaaagatttcagattttggaggttttggagtcaggggtgctaagtgcctaaagctcagctgagtatggtagctcacacctataatctcagtacccagggcacggaggcggagggatcatcccaaatttcaggtcactgtgggttacatagtaattccctgtaaaggagggaaaaatacctaaaacttacatcaaatgatcagctcacagtgatagcttcatgccaccaaataagaaatctaaaatccacacttccttcacttctctcctagaatagctcatctgcggccactacccattccctcttgttggagccagccctacaattttagtctaactcagagcataaccctcctctagctgttccgacaccaacacccaagtgcagcagacggaaatgcttctttgccaatcgaccgctcactcctaccccactgcatcccactccccaagttcactcagcccttacacagagtaactctgcaatctgcggctgcccgagtgaactaatagcttcgagtcagggatctatgtaacactccacggaggatgggggcacttacaggagcctagagcatgatggtcagtgtgtctgtgtgtgtgtgcctcgagaaacatgtatccacaaacacacggcattgcctcaaagtgagcactgtcaaagcccgataatgtctcagatgaaaaggacagaacaatgcctatgtggagacaaatttaaaaactctcttttcaactatacctaaaactgaatttggtcaaagtttaaatacataatccaaagcaatgtcctttgaggtcactctgctttccagtagctgccataatcacaaataaattaaaagcatcaaaatacatatttaatggattcttcctgcctactagtattctgtaagatcaatggtgccatgctttcccctaaagtgggcattgctactttgttattaacgtgacttgttttacctgaagatactattaaatgtttcattttacttttcaggtagaaagatggcagattccagtgcagtagagctggcgatggacagcaagatgcaaaagggtacacttgccatgagcaagagaaaaacccagcagtgccctaacgagattccttaggagcacagggtggcagtaagggcgaccagtaaatgccactttggtattcggaatcttttggtcacttcctgttggaagctaaatcttctgaaatgggacgtaccctggacacaagaaggcttaatttcattgggctagataacaaagaaacttgatatctggctaaggtatttattgcgctgtattagaggcctgtctcaaagaatcctggagagggaaaaacagtgtttttcagaaagaccacaaggaacacacaattttgtatagactggagtaaaattaatgatcaaggtgagcattgcataaggccaaggaaaaagagaaactgaagataaagggtctatatgcacactgaccaaatggctggaagcaaagcaaggagcataaatctctggctgtagagaacaaaaaccaaaataccaaagcaccgagctacctttaaataattgtgctgggggccagcaaggcagttctgcagataaaagagcttgatgtgcaggcctgacagcccacgctggatctccagaagccactgcaggagagaaccttctcctgtgaaagctgtcctctggcttccacacatgcaccatggcatgcacaatcccacacacaaaacaaatggaaaaggaagtgtctctacttcataaaataaacacatttacacaaactactgcatctcacagacgagctgtcatcatctacagcttgtgtgatggagaaaacatgaagagatggattttaaagtcagcatgatttgatttccataggtgtctgcctactttgtacctacgttaggaacatgaaaacagcactgacttcaaaacaaaagaaagtcagagagcagttaggtagcatctgaagctgctagagcaacatggctatgtgggcaaatgcttcagaaggcattacaaggctgtaaggcatgctaatgtgaaaacttaatcagttaaaaagcggacctgggcctggtggcacatgctataaaccagctgggtatgtaggaagcagagaaaagaggactataaatttaagacccaccaggagttcaaactagactgagcaacttacagagaccccatctcaaaagaaagaagcaaactgtggggctagagagatagctcaatggttaagagcagactgcccctcagagagcctgagctcaattcccagcacccaggtggtggctcacaactctctgtaacgccagttccaggggatccaacagtgtcttctggcctcactaggcatacacatggtaaacacacatacatacagacagaatacatctttaaaatcatcatggtttttatgttttaaaagcgagcactgtggacagcatgtttaggccctaaatggagtccccaatacaaaatgggaagtgaagaagtgaacgacaggtgagctttatcctcaccctgttctgattcccaaccctaggaagtctacttgttcctcctcatgccatggacctctccatgtccgcctaaggcaagctgctggagcaagtggtaaactgtagatactgaatctacaaccagctcctagcaccagctgggcccttcacgtggcaaggtgaccattttgctcattttccacagggttcctaaagcctttcccaagtcttccaccatggcacccctagaattctttctccccacagccaaggaacaagctttcctagtcatcagatcatgtcaactctcactatcctgcacccctccagtggctattgcaccccttccacagaaaatctacattctgccaattctctacgtcacttcctgccactctctctccaccctcaaagctctggtctagctagtttccaatgcttcactatgggcatctgcccagacacaagcaattctgcccactggaaatgttccatgtagaaatcttcagtgttggctcattccttccaaccatgaagatacagcagaaacgtcacttccctggccaccccatgtaaagcagccacccagtcacatcagcctaacttacatctcatctaatgtcatttcacgtgtgtctcaacctcctcaagctccatgaaaagtagtctccctgaacgttgtcctgttctgttctgtgtccatgacactcagaaaggagcctgaaatacagtggactttcacttaacatgtattaaacatgtgctggccccaaacaaccatcatgagaaaaagtgaagagacatgatccaattataatcccatccaaagcagtcctcactacacaccacccagacagtcctgagatcacaagacgtggtgctcccaccccaccatcatcctgagacttcctcaggtccctctgcaccatccaactggaaacagcggtagagcgagcccgccatttcagtttctgtcttcatctcccagtgcctctcgtccaccctttgtcccttttgtttttaacaccatctccttcacaccctgtttaaaattaccactgcaggggatttattaaacatccctcatcaaaagataatcattaatccccttctctctccctatgaatgagaaagagctgagctctctatagtagtagagggagaatgttttttaaaggccactgagctatttcctctacttagaggcagacaaccaccgccctttcaatgggaacttggtaagagctttaccaattttctcattttgtgtgcatttaaatagaaaatattttctttttctacttcaaaaattagctacattctgaagagaatttttaagatttatttttgtttctgtttatatgtgtgtgaaagagtatatgcatgtgtgtgcaggtgcctgtagggaccagagatggtcactggatccccagtggcaggagctgtcgtgagctgggaagccaatcccagtcctctggaagagcagccagtgtccttaccactgagccccctccagcctctgaagagcaatttctgaagttatcattagccattagccaaaataacatggcaactgtttgctctccaagtacattatagcccaagcgcttgcaagcttgaacagagtatgtatttgcaaacagctagttcaaacctcacttcaataggatgtgcaaaagcaaattaacgaaacaacttggagctccaaggagactagctagacagatctctctaggtcaccaggctgtgttacacaaaggagctctggacagaagctttttcactaacctgtgagggaagttaggtttcccacctcctgcctcaccccacctccaactctaggtttccagtttgtctcaactcccaacacccaggctgtgaaccacctgggcctccagctccaggggagctgtctcctctggcctcgacaggcacctgcacccaccctcactcacacagaaactcacaatacacagctttttacaattaaatctttttaaaatttttctaagaaagcaattaatgtttcagaagttcagtagttatgaccagtcacctgggcatttattttcactggcaatttggtgctagtataatctaaataagaaagcttttaaattattttacatagaaaaaaaaaacttaaaccatcaaaaaccatacttgctaagtttcttcccataatccaaaccttggacttggcacttacttctctgataaaacaccacgcagtgtttggtgatgctgcttttcctgcctccttctccaaggagcacctgtgactatcacctctacatgcaggacagatgcagaatcttaaaaagtcttaccattccaactaagaatacacctcaaaatgtggccattctatctacgtttttccattctaacggataagagaaaaatgctctgcttagtatctagcacactatcaaaacccagtgcttaaatagtgtttggcttgagtaagtggcatgaactgaacagaatactctggattcctaagctcttaccgcccatgcttctgtgagacacttgtgagtggagaaagctagggagaggcttataacacaggacaacatatcagaccagcatacactgctacagagctctcttgtttgagctgaagaaaacccagtcgctctgcagacttcaccagggctcagtgtgccttttaatggccacctgaggtagatcacccagagataaagggcaaagtattccttaaaagctccagcacagaaagtcctcattgttcctgaatctgctgggaagggggatgccagctcttcctagaagagtaagaatgaccctccgaggtcccttccagataagctaattctctttaatttttagagcgtggggcaagtgcacacttgcttacatttctttatttctctaaaaggcaaaaaaaaaaaaaaaaaatcagaaagtttcaaatgtgaaatcacatgtaatataattgaagtcacagggccacaaaattgaaacacatgaaatgtgagatctttcgcacatttttaaaaatagatgattcaacagcctttgaaaattacaactctagagacaggaactcatctttaagaggtgagccttaacttcattctggaataaaaccccacatgcactaccttcttatagtcttagtcacctggaagaaattctttcaaagaacagactttacacaggctcaatgctccacatctgtagcttttctcaatgtttgtatttattttatgtgcactgatgttttgccttcatgtttgtctgttcgagggcatccgatccctggaagtgagttatagctgccatacgggtactgggaattgaacctgggctctctggaagagcagacagtactcttaaccactgagccatctctccagcccccacacctacaacttaattttttttgttttttttttttgtttgtttgtttgcttttttgtttttcgagatagggtttctctgtgtagctttggagcctgtcctggcacttgctctggagaccaggctggcctcgaactcacagagatccgcctgcctctgcctcccaagtgctgggattaaaggtgtgtaccaccaacgccgggctatttttttagtttaagaagagaattccagtttggaaaatgctggcaaataaaagtgggtttttgaaaacacaatacttaagcggaagttctgcttttgatctgcacagagtggagctacagaatagaaaggctgcaaaggagtcacctctataaccaattagcattcttcatgccagaagctcaaaacagcaggctttgttttcccagcactaataaacaactccaagtaattacgcctctgcagcacggacaggaaaaatgcacaaatttaaaactaactaaggtcagatcaaccaagctttttaaactgaactactgtgtctggaaagattacctgcagtatggtgacatctggtttgattgcacatgcaaaacagtcaccaccaggcacaggcagctatttaaacataattaaaatgaaatcatttatcaagttcagttcttcactcacaatagccacactgtgtacaaggcacttcgggataatacagggcaactcaccactgtctacacaaatccaaacccactggccttccttggggcaattacagggtgtagtttttcattggtagattctgttttttaatttaccatttcatagcaaatatgaactaacattttaatgaaactattttctgaaaagagcagtaaattctttcagagttggataggctctttgctaaaaacatttttttgttggaatttaacacttcacaacatgaaagtaataaaagaaatctagtatcattttcaagtgggtgagaatttttgttttggataattgcctccatttgaaaatcagttacaatgaatgtaaaactaaaaagccactctatccaagtacaaataacccttcttaataaatgaaggtaagatgtcaactataaaatcagtttctcctcactaagtggtggagatagcacagaacaagagatgttaaccatggcaggtatctgaaaggaaaaaaaaaaaggagagtaatcatcacgccacttgcgaagtaccctatcattagctcctctgtgattctcatttatttttagttagcctgctaaaatgcatcttcacttctggctttgtaaccaattatcacttcacgtcccacagaaaggaagactacttgagtctgtactatttggttagaagatacatgaacaccactgtgtttgtatgtatttaatataatgcactagaattctagaatgccttcccaaagaaaccaaggaatgtacttattgccttgaaaacagttagaaaggtagaactttcaattacatatgtttttaccacattaaaaagcacatcaaggcagctggtctaccctatgtgtgccgtctttccactagaatgatgcttttcctgataaatttctggttttccaaagtaataacaaacaaaatgcaacaaaaccttattcgtattagaataaaaatccaagcatattaaaagctaaagatgaaaaccacatttaaaaaggtggttttaagccaggaatgggcggcagccatgtctgttatccatgcattccagatgctgatgaaggagaactgctgtgagcctaggctacaggtaccacagcagcaaggtacttcacggcaagatctatcccaaagaacaaaacctactttcagaggctttatagcccagtgacagagtgcttgtttagcgtgtatccaaggccctggttttcatccttattaccacacagagttttcttttcaggtaccccaataatacaagtataaaagcacttacaacctgaggcttggatgctggagagagatgcttttagtagttaagagaagttgttattcttacagaggtcctgggttccattcccaccaccacagagcagctcacaaccatcctacctccagttccaggggatctgatgacctcttctgacatctgtgggcaacacacacacacacacacacacacacacacacacacacacacacacacacacacacggtacacagacatacaggcaagtaaaacacttgtaaacacaaaataactcttttgtaaaaagaacacaaggctgctaaatgaaatctatcctatttttatgtatcactgagtaaaaatctcatgtgtaatcgctgttgccaattcaggagttttatgtagcacctatctaagccacatcccacatgaatccctttcttcataaacagtaactctaaccttccagactactgagagctggtattctatcacccccaagttacagatgctgaagcaaagagacagtttctttttctttctttttttttttttaaacatctgggattactcatcatgcacactgaacctcttatattaagattctactgacatcagaaaagtagtcaaaaccacgtgacttaagtgactttagtcccaagattcctaacttctttcaagaattctgatgatctgctacataattggaaaaacatgcctacatgaaataaaacaaaacaaaagataccttgatattaaactggcttttcaggaagaggtcatattgcaacaaaaacacctattctcttccttttgctgttcagaaaaaaactggtagacaacctacacaagctttttcacaacaaagaaataaaaacacaaggaataaagaagttaatgaaacctaccattatcaaggtatgtattttactatgagatattcacatcacaaacctcactcaataaacgagtactaaaccagaagatagaaaattctaacaattccgaattccttgactcttccaataaaaaccaccccaagacatctaaaccccaagaatcaaattattatgtatgtgtacaagcagaataacttaggacatcttctacaacgcaaggggcaaggagatagcatattctgcatgtgtaattgcaaaaacaaaacaaatagaaaccacacacacaaattccatcactctattccattgattttacaaaagcaagaataaagttgttttaggtttttttgttctgttttcttaaacaagtgaagctaagcgaacatgggttgggggagagatggatatggttaaaatacattaacttttcaaagaatatataaaagttattccaaaaaaatttaaaaaacagaactcaggttgattgcaagattgattctgcctgagagaggagcacccacgaggaaatccacgactacagaagccaccccaaccagccaaatctttctctcgctaaagtggcttttcggaaacatctccatgtaaactgcagatcacctgtggtctggtggtcaccacagatgcctaaagaactactcttcctccaaggtcttgcagaacaagctgtgggagcgggtcacacaagttttcctgcgaactaaaacttttgaggctacatttactaaaacctgtttccacaaagagatagggtgactgggctgctatcgccaacatcagatcgaaattcaagggggttaaaaaaaagaaagagagcgagagagagctagcagaaataaagaaaaagaaaggaaagccttttcaagcgttatgcttcactccagtaagaggctcacacaattaaaagaacaaggttcccggctccccggctccccggctcttgaccttcaaaacaacccccaaaaggtctcaatccgagaggcaaagtttggagcagaggcccagggctgccgccctgacctcagaggcagcaccgcgaccctcgcgggaggaccgtgcggaacggagcctgagtcccgaacccggagctccgctgccccgggccccgcgcccgcgccccgcatacttccgggccccacgccccggccccagcacgcccacccgcttaccggcatcatcttggacccgaaccgcatggaagcgggggtccggccgcggcctggccgagctgagtggcccgggggtcgcgggcccggggaagccgagagaggacgaggccgcgcgcctggcggccgacctgttgcaaggcagaggcgcgccaatcccctcggcggagcgggacgccacagagcccccggcccagtcccctcgccgatacccgggacgcgacgcggctttgtctcggcgttcgcggctccctcctcctcctcctcctccgaaaccaactaatcccggccgggcccctcggagcagcgctggccccgcccccgcccgccaggccccgcccgcggcgcgcccggaggcttgagggaggggaggggagcgcctggccgggggtgacgaagacgcatgcgcagactctgggtgggccgagggggcggggcacggggcggggcccgaggggcgggaacctttgggcctggggagggaagtgttggcgacgggcgcggcggggccgctggagcgcgcgcctccgggcggagcgggggcgcgggaaggcggcgcctcgggagagcaagcatcgtaaacctcgggatggagcccagtgctgtgtccctcagcgccacggcagttccgaattgcacaagactgtcgggcgcttggccttaggaaccgagatcctgcctcaagggctagagaggcccggcggcgccacgtcacacgcgggactcggggagcccggccggggcttccgccgccccacgaggcccggagcacgctcctgactgcaggggctctcgaatctgccctcccttgcactcctccggccgggcccaaggcctccttctgaaacctgacttgtaaatagacggagaagaaaagcacttcggcgccgctgaagcgggaggtgccgtgagagctttgaacagtcgaaggcttggaaatgtgtgaaacagccttctggggcgctctgcagctcgtcacacctagaaacgtagcccgagggtcatcttttccagctctggcagctcccgcggggaaagctgcagtgtttccctttgggagggcaacagctagctgagcagccagccctcttccaccatccctctagagacacagccttcaggaacccagctcccaggtctcatttcacgttaagcagcccatgctagctcactcggaattctatgtcattgcacaagattctccaagacgaaatgaaatgaagcacctgaatttagggagcttcaagaggggggccagctgaacgtagtggcatacactcgccgtctcagcgcttgtgaagctgaggcaggaggattgcggtgagttcgaggccactctgggctgaaagagtaagtccttaccagaaacaaacaaacaaacaaaaaaaaaaaccgaataaacacctttttgaaattaattaaaaattgaactgggtcattcccagccatttagaaggtgtgaggccagaagactcaaataaaagtcctgcctgggcagcttggccgaataggtctcatataaactgaaaaaaaaaaaaaaatagagtctggaaacagctcggtgatagaggctcgtttaacatgactaagctcccggttttaatagcaagtacaacagaaaaatgaacaatccttgtttggagtagtactacatgcttgtcatcccagacctgggaaggctgaggcaggaagaattaggagtctgagcccagcctgagctacatgccttgtctccaaatacataaataaacaacaaataaaataataattatttcttaatttaacgtatctataaaatcaccatctaactccctattggtgccatcccagctactatttctaaatatgaaattataactgaggcaactagaatttaatgttctaaggaaacctagtttagttaaagtctatttatttttaagattatcctttgttaagacttccatttattcagtaatattcatgaaaatactagctatgcactaggtattctaagtactatagattgaacaaaataaagttgaatggacaataaaaccagtacttaagtattttgacagtaaatatttaattttaaaaaacaattatatgtatctggatgggcagaaatagacactaaaaggatgaggcttagaggtatatgtttgaatagaatattcaaaacagacctcactggaaagcacaaactggagggagataaaggattaaactacatgaatatatgaaagaaaacttccaagcagatcagccaatgcttagccaaagagaggagcctgtttagtatattcaagtccactaaagaggccaagataactttataagactgaggagagtagtagggtataagacagggtggtatgaaggattgagtgggggctggaaaggtagctcagtggctaagagcacttcctgctttcccagaagtttgattcccagcacccacccacaatgcagccagcaacttaactctagttctggggtggggatctgatgccctcttctgaccaccacaggcattttgtgcacgtggtacacagacatatatgtagcaacatccatccacataaaataaaaataatcaagtaagccaaggtcctgtgggctattattataaggatttactaagtgaaataggtgtgggagtttgagtgaaaagagacccatagggactagctctcttaggaagtgtggttttgtgatcttgttggagtaggtgtggcagtgctggaggaactgtgtcactggaggcaggctttgaagtctccgaagctcaagccaggcctagtgggttttgctctcttcctgttgcctgtccatccgaggtagaactttgacctcttctcctgtaccatatctgcttgcacgccaccatgcttcccatcatgatgattacggactaaacttctgaaactgtaagccagctccaattaaatgttttcttttacaagaagtgctagggccatggtgtctcttcagagcaacagaaacactaactagggcaacagggaaacaatgagaaaaggtttttaacaggagagtgatatgcactgtcacattttaataggatcactccagctactagacaaaacactgaaagttagagaatctataggaggccctttaatactatagacaggagatgaaagtaacttgggtaggggtgaccactggggatgtggtggcaagtaaagacccctcagatgtagggtctttagcaggtgaatccacaggggttccacaaagactaaatagggaatgtgagagaagtcaagaataactccaagatctttgtcctgaagcatgaaagttgccacgaactgagatgatgatattctgagcaggtcagctttcatgaaagaggaagttaaccaggagcgtgttaacttccaaaatctgaacaaaaatgaaagaaaatctaaccctgagtttttgcacagttgtagggagtaagttattttcagctaccagcagttcatacagggacttttaaaagtctctctatcccacttgtttctatttctttcctataacaaactgcagcctgaaatatgatctacatacagtcttccagaaaaagaatacttattggtcactaatgctccagttctcaacaggtcaaggaatgaaaaacttatctcattactaccagaaaactgaatacactcaatgcaatatgtttggtatgaacactggcaacactagattagttaaaaaaaaaaaaaaaaaaactactgccgcaaaaatggaaacaaggacagaagaatgtgagtaatatactcccgttgtttgtcttgactgttgttgacacaaatgccctgcccaagggaagggagagaaaacgggacagtcgctggcaatttgtcctgaaactcacttccagccaactgagaatttccagctgccaaatatcaggtatgtttatagttgagggattttttttaatcatagtagaatgaaactgaagaagccttgtctgtgcttcccttcactcccttcagctctgtgtaagtcacacatgactggcagatgggtggtagctgccttcctagtttcactttttctctattcccaccttcacctatttactcctccaaaggcctcaacttagtcctccccaccccataattctgtatttgactccaagagagataagtgaaattaccacaagctggctggggaggagctgccttctctctttacctcaccccacccgtaggcacagtgcaattacctatctgtttggcatgtgtctccccatgctactcttgcccatttcccacagaccttctctctctctctctctctctctctctctctctctctctctctctctctctctctctatgcactcccatgttacttagccaataagataaagactagagatcttacacctttgcaactccattctcctgtcttccctttggctgccttccttaccctcttcctacttctcttttgatttgactattgcagtcatccctccatatccatggaggactggtttcaggatttcggaaaagtgtcccatcctgtggttgtaaggctgaactatattccttgacatgggctactctgagctcttgcatggtccccctcttacctgccctccaaaatagtcagggtaagagagaagtacagtgtgcatgcctcctcacagccacgacaaaatactcaaaatgggttacctagaggggcaggtacgatgctctaaaacatgtgtctgtaatattaattccattttacctgactcatttgtaattgtaattgcattgacaacttgttttcatggagctcataagtttgtctcctggtgtcagttctctcttcagacctcgtgatcctcatcttacctgcttctcatccccttcaccccaactagagcagatcgtgccagagtggccagagatctctatttcactgatggaataagcatgttctgtcttcaccacccttggccctccttggggcagcatgtggctgatgcttctcccgtctcctctgtacacacttttcctgactttcagggatatccttttccttctgtctctgactgcttcttctctgtgccctttgaagcctttttattcttcactggcctttgcatgttgaaggcaactgactctcaatcctatgcttactcatcccactggccattctcttcccactgttaactatactgttaagccttgtcagttctttgtattcccaatcccagactgctctgagctctagaatggggctaataaatgagagttgctaactatactacaaggagcttgttttttcctgtgataaggataggccccaaatcttcattcatgtcaaggccattttctgcctctgagctacacccccaacccactacatagagctattgactacttaaaatgtgactagtagaacagagagactaaattatttttaagatttgtgtgtgtgtgtgtgtgtgtgtgtgtgtgtgtgtgtatacatgagtacagatgcctgcagaggctagaggtgtcagatccctctggcacaggagttacaggcagttgtaagccatccagcatgagtactgggaatagaaccaaagcattctggaaaagcctctctccagtcttctaatgcttctattttaattaaattcaatggctatgtgtatataatagctaaaacactaggcagttggtgtcatcacagtgctcgctgtctgtatcatattccggtgcctggttgacaacttcctcttgcaagcttgacatgtctaaaatcaaacccatagtctttctctcccatttgatcctctcctattccctgttgcagtaaatggcaccatgttcatttcctcaaactacaaacctaagaatcatgcttgagtttgtttatctcttggtctattctatttcctaaatagctcaaattcccttcatctaccaccacactacactgtttaaactaccatcaccttccacggagatctgatcagcagacagacctgatgaaagtccatccctagtccatccctactcctccaaatccttgtgtgtccatctgtgcctgctagcctcgttgtgtaccacaatctctctctctctctctctctctctctctctctctctctctctctctctctctctctctctctctctctctgactcagccacaccatcctttcccagtctcctttgcttccatgcttcctccatgtctgaagacctcatcttcacactctgcattgccattgagtattctgaaacccagtcttgtgtgtgtcacaaagggtctccagtcaatctctgtctctcccataagactgtcagccatagggtcagaattttttactcatccttatgtagcatgaagactttagtacccaaaacagagcttataataataaggatgaatgaataaaataatgacaaattaatgagttatttgttttcagcttgtgaggttcaaatcaatgttttgtacatttcccaattctatggccataggtatactgtgaccccaaatggttaattcataaaagcttgtaagagggtttggttgaataaaatctgtgggacctgaacacattcctgggacacagtcctaaaatgcttcctgttctgatggtggtcagtggtgtcatcatccatagaggacattatttataattattatgcaacctctgaaaagaaaggaaatctacatgatgaggttttgacaagtgaaagcagtctagtctaaaatattcaggcacttcttgtgctacggcttccccagagccctctggtcaactacagtcagcagagtccactacagtttctattctccccagtgcaaagaaatttcattcctgtgagaaatgtgcatgagtttttttctccccatctctatggaaatacacatcacatcagaatgagctctgttgtggttgttttttaagccatttttaaagtttgtgtgtcatggcaggggttattggtgctttagtttttcatgaatgctgccaagagtgcttggcttgtgttgtttgttgaaggcttcccaccagagcactgttgaaggtgatggattctttaggaggtgggacatgatagaagctgtattattgaggcatgccatgaacattgggaccccagccctcttgtgctttgcttcctgattagcaggaagtgaacagattcctcagctttagccatactgttctgccttaacataggcccaaaagcaatggggccaatcgaccatggactaagacctgtaaacccaaaacaaccctttcctgccttttaaagatattcatttattagtaacttgtgtttatgagtgtctacatgcatttatgtatgccatgggcatgcagatgcccccgggggccaaaagagaccagaaggcctcagggcccgtggaactggagttacagttgcaagctgcctgatatgggtaccgggaattgaacccaggtcacagtaagagtacaagagttcttaaccatcaagccaaccctccagccctgactttcctccttttcagtagattatctcagatctattgttgaatgactgaagataacacctgtgaaaacacactggtttatgatagataggcaaagtacttgctgttcctgtgagtgtgacacacaatatttattaccatttgggtgcactatacaaattttccccaaatagataaagaaaaacaattgcaacagggaaaactaatcaggtgttttagggaagtaaacatggggtttcttgggaattgaacacatagcattgtgcatgctaggtgagtgtttcacctctgagctttataccaagcccagatgaatttctatatgtcatttaaacctcatttatgtagactccacaactgacatgtaataagtgttaggtaacattcaagttagctattcattgataggtaagaatatctcatctttttaattaaggaaatgtagtatttctaagcatcttggataaactcagactttattgctgctgtagttaaaattcttgggagcattaggaagctggacaaaaacaggtaaacagaagacaaaagaaccaaaatgtggggaaagtatttgtttgaaaagaattttcagttccaactggtgagttcccaagttataaccactgaagagtcttttccttaatttatattctaagggtgttcataaattgatttgcagtagaatataaatccattctcaaacgtttttcacatttactccatctactagaatggttatgaaattgaaaaaaataaaattaaacataccttgttaaattatttattaatggtttcaactaaaatatatttatgcattacaaaggaccagctgtaaccagttctcccacctatttaattacattttttatttgccaaaatgttttagtttgcatatctttgagtgactgccattgaatgtctattatgatctgtgtgctaacacgtctatatgaaatcaggtatgcttctagagttgaaggtgctctttaaagaaacccgtgtgaagggacttacaatcctctgataatagtgcagtccacattcatgttctgattttatgactaagggactggagccaagaagcataaagcactttgtctgctgatttatagtagggaccttcagaagctggaagttgaacttggatgcctcagatccagatctgtgtccttaaccactatgccattgttcttctcccaccacgatccaaaccttcagtacctctgtcctgagtgccaccaggcctggggcctgtcaacaggaacacagtaaggacaattcaaagcatgcattaatctagtagaggacgatctaccagcaagtacacgaatgaaaccaaatgtctctggtcaaagtcacacagaaaatggtcacctaaccctaatcctgccgttgtgaacagtcaggaaaaccctcacagggcagaggattcacaagctgagactggaaaaataaagaactaccataaagattgcattaaaaaagaagaaattttattttgactaaattcataaacaggcacagtggtttatgtgtcccagcttcttgagaggttgaattggtagtatcactggagtctgggaattttgagaccagcctggaccacaagtatgaaccatatctcaagtgaattataaacagataaagcaggtttcacggagtttatcccatgtatatagcaatatggtgtgtacaaagttcctaggggagtttctgtactcgagaggagagaacagtgggcagaaatagctgtaactactgtcctttatagtacttcatgcatgtcacacgggcattcagcccctccgtgaacatttggtcacaaatattgaccttcgctaaccctaaaggggaagactatggtctgtattttactaaagcttacagatgctgacttgttgattcattccacaaatatttctaaagaatttaccttgtttggactaggtgcaattcaaagctctagagatatggtggagggaaagactgataagggcttttcctgcttatgaaactatgcactctaactgggatgaccccataaataaataagagcaacacttaaaataagatgacatcatagagactggggctgggtaggttggaaatagtgctcaggaaagccccatcccaagagatgacatttaaactactatctgaatgataaagactaccttcggaagacctagacaaggagagcatcaggcagggggacagcaagggaagagatgctgagaaaggtgatattggcatgtttgatgagcaaaagcaaacccagagtgtctagggcggagagctctcctctgagccagagcgctaataaacagcagatctgatgttcaaatccacatctgcccaggatgaaagcccagactccacgccatgcaacactgggcaaaggaacaggaagaaagctcggtgatctgttaccatggagcatgtgtttaagttagcaggaggacatccaaagatcactgggattagaaattaaaatggaagacactctggtgagcagaaagacttcctctgagaacatagcaggtgagtaaagaattgtgttgtagcaacagcataaaatgtatcttcatctaacgctgatgataaactcaaccccttccatttgaatttcttatcttagactggaatcccttgcaaggatgcaggaatgtagcagcgatgcttcagcttagaaggtcagataagcttcctgccaaaaaatgcttgtacttctctgaggcatgaggagagagccattcagtctgaagagtccatgcttctaatggctccaagggaagcatggtcagcaggcaggagccatccaggccagaagtttcacaggtggaatctgctagtcagatagtgattgaatggcatagatgggagaaggtggtgaattcagacaggagttgctggtgagataggaatcacaaggtaagtaagtggcagatgaccaaatcatgggcagggcaggctcaggttgccagacaagatgtcataaacaagaaaggcagaaaccttagggaaatgggacgccatagatgagtccaagagggacacaatgttctgacccctagctggatcatatgagtccattttaactcaggtcagcctgaaccttcgctgcatctaagaacaagatattgtattcagctaggaaaggaaattaatttggtttctccctgctgcttgtttacatactggaagatgcttttccagagctgatgctacagtctgaaccagaaatgtctcccaaatgcctgtgtatcgagggctgggacggcagagtgatgctattcgggggcgatggatttcagagtggagccaactaacacaggccgctggcagcatgccctgcaaagatattgtctgtttttgtctcccgttttccttcgtgactacaggaagtgagcaactgtctccaccacatgatctcatccaaatatccaccacaggccccaagcagccaaggccaacctgtgaggacagaaatctccaaagcagaagtgaaacaagccttcttgtcttcgggttgattagatcaggtgtgtgtgttctgcctgcatggtataagggtggctggagcacacatgttccctggtagcttcagaggcagcctctcaaaagaacaagggaataataaaccatattatttcttaacatgatcagggaaaactcttgactgttgcttttaaggtccaggccaaaccctgaaatggctcagaatcctgttaaatcctcatagtattcctaatttacagatagataaatttgaacttaaataaggaccttgtccaagaccatatattaatgagaagcagtagcaggttggttatcctgacacataaacatgtgatctttgttttaatcatctttatgaggtctaacttatacaccatataatgcatatattttagggcatatttttttaatttaagcaaatatgcaaacccttgaaaaaaccacagaataaagctacatgacatttctgttatacctttgtacattcacctcgtcatctctaccctggacaagagtgatctgctttctggcactagccggtgtttgcctgtcctggaatatcctgtaagtagtacaattcaacatttactcctttacatgtgacttccactcagcatttgtagcattgtctttttggtgttgtcataatttgacaaatccagcacataacctaagtgagtacaaaactgatgtcttccttgaagacagattccaatttcaggatcatttttagacacaatttttcaaatgacaataagatgaagtcttatttgtgcaaagcaaagttttgtttacatcttccattatctgttttaaaaattggtgagttccctctctgtattatttatttccctctcaatttattgttgaataaccaacaaagctatatatatttaagatggacaacatgatgtgttgacctacatatagatagtaaaactattagcatgatgtacttatttaatgtatccatcccaacacatagacactatttgtgtgtgtttggtaatgacattgaagatatatgcaccaggctttttcttttggggatgccacccagcacccagatcatggtttggagacttattattagttttgagtgctcagccttatcttagctcttattttaatctgtttctcattatctatgttttgccttggggctttctacctaccttccttctttcccccctcccttcctccttttctctcttccttcccctttcgcttcctcccttccttccttctttccttctgtatattttagtttcctgctgtctccatgtctgtctggtagttgcccagcttctggccctggtcatgtccttctctttctccttcattctcaccttctttcttgagcctagatttcttgtccaacttattctttctgcccagcagccaatactatccctctcctgcctagctattattggtcattcagctttttattaggccaatcaggtgccttagtcagacaaggtgaaacaaatgtgacacatcattacattattaaaaacaaatgcagtataaacacttaacacaactttacacagttaatatttcacagcataaacaaatctaacacatctttacatagttaaatatcccacaacagatctgctctttgaacaaacattatataacctgcacaatggttttgaaacacgtttatttgtttgattgattcagggtctcattatacagtcctacttggtatagaacttgccatgtaaaccaagctggctttgaactcacagagaccaggtggtattttccagtgatttatgataaacatctttgtactttgtacttactggccattcatgtctcctttcttgaaatattcaatccacctttgaattctgtgcctgattgatgagttataaaacttttaaacatagtttgggaaaatgtccttttggtgcacatatatattgagaaactttttatttcttttttattttagaaacaatcttattttacatatcaatcctcccatccccccatgcttcccatcgaccccgccacccaccccctcccactctccaaggatagtgaggccctccatggggggccatcaaagtccgtcacatcatttgggggagggcctaggctctctttcatgtatctaggctgcaatagtatcccaccatagggaatgggctcccaaagtccatttatgcactaggaataaacactggctccactgttagaggtcccattgactgcccaggcctcccagcttgcactcacattcaaaaggcttggttcagtccaatgctggtttccccagctttacaactggggtctccatgctctcactaggtcaggtcaactgtttctgcgggtttctccagcatggtcttggcttctttgcttatccctcctccctctccacaactggattccaggggtatggctcagtgtttagctgtgggtgtctgcttctgctccagtcagctactgatgaaggctctaggaatggcaaccaagatggtcatctatctccttataggggaagggcatcgaaggcagcctctccaccactgcctagattcttagttgggatcattcctgtggatccccgaacatttctctagtgccagacctctctccaaacctgtactgtctccctctatcaaggcacctcctttcttgccctcctctattcctcccgtctcagtcctcctgatccctcctgttctctactccctccccttctccttctctccccttcctacctccctcctctcccccccccacccctgtgctcccaatttgctcaggggttcttgtccagctctgcattaggtgttttgtcttttcattttcttcatacaagttgaaaatctaaaatctgactgacttaccagtagagaatcccacacctgacctcttataaccataagtgaactaaaaatataaaaataaccttcaggcttcgcgtatgagatgtttatgaaacataatgcatttcataaaaggtagacttggatcccatatccaagatgtgtcattgtgcatatttaaacattctcaggattttcaaaactctgcaactcaaaacccttttggatttcagatatcttgtttcgtctttccaaaatttttagttcatgaaatagacagctgcctttctcccatttagttaaggtggtctctttccatcctgccccattggtttccagatattgtaataatcactttccattccttgaaaaatgtcaccacggactgaagcccagtccacagctccaaagtctgctttctcagctcaggagggtccctctcctgtgctccttcaggactctccctagtctaggaactgttcccaggtaagagcattctcattccgtcagcctccttcctaaagcgttccagtcccatacagggttttgccaaattccaggaagcagttccctcatccagtttgtccagttttctgattgcttacagcaagaaggcagctctagttccaattaccccatcttggcctgaagtgccagcttctgctcccaaacctaagctatagtgccctctattgctgggagacaccctaaggagccccatccactgcgggggcagcagcagtagcagcagatacaaatactaaccaagagtgggactttgttagcatcctcaaggctgtaaggctccaaatgtgttatgaagatgcatccagtgcccatcactcaaaaggctcttaccgttttatttcgaaaatgataagaactgggagaggtttcttatggtcagcttactggtttgttacatggccacaattgttcactaacattcacaaactggcagatttcttctcctatattcaaggctatcaaaagtcttatgtcaccattaaaaaggccatgaatcactatgtcctaagatggcccaaatacattgtgtggatctaaatgtcccaacaaggacacataatcacatgcaactatgaagaaacaccttcctggactcaggttaactggcagaacctgctgacccaagtgacagcctggttcctcccagccgaaagattgacaggagcagaggccttgtggtagcattggccaggttagcaccatcacctctggggatgaatgtgtttgggtttagagagacgatatctcctgtgaacgggagatgaagatgggctggtgggaagtcagacctgtgaacccaaaactggttgagcctaaagatggtgaaatgtgtttgccagtcttggtggacactggtaagttaaatggctcctttcagataatgccagatacctaactatgaatttaagtaagtctgagaatacgtcttcaagggaagagaatgcgcaggtcagtagccagaagagaattttcaacaggctggaaaacctggcctatttagtatattagttcttggacaccaagacgtgtaggacagaagcagatttgttgaagagatcagagatcattgtgactgcctaaacaagagccgaacatggacaataacaaaagacacactcaataaagtgggcagcaaaagcccccaaagcctcaactacggaaacaaagaactccaggcaaacaaggaacgctgagagaaagagatagtctccccacggaagaacacaccaattggttgtcgaatactaatgggtcagccctgaaaacgcataagactgaacagattgcatttatgtctttaggaatatatataatgtatgtaacaacaattaaggaaagaagaggcctgaacttgaaagagagctaggagaagtatattggaggatttggaggaaggaaagggaaggaggaaatgacgtaattacattatctcaaaaaaaaattttaaaaaggtatcaaagaccagatgattctccatgagcaaacatttccacacagagcagaaaagtagtctttttttctctctaccttatttatttctggtattgaaacagaacttcatacctgcttggtaaatgttctaccattgagctaattctccagctcccaaattagtttgtttacacatggcttgagcccatctgccaaacttctcccctgaaatgaagtccttttggtgtctaagaacttcattcttgcaaagaaatatatggagtggctaaaatcatgggttgagtgtcacacaaaactgtgacagatgccacctctgctacttcatgggaatgcgtcattagacactttgattactaggagccttggtttcatcatctgtaatcgggaaaactcttagatttggtgttactgtgaggattaaaggagtcagccttggtgggatgccagtaatgaactagctaaaaagaatgaggcttaggccagcctaggctacacatacagttcctcaaggtggggacaggaggattaattaagtctaggagttctgagctgtagtgcatgctatgatgacctggagtcacataggtttggcataaatattgtcacctcccaggacaattataggagtgtgtatatacaaaacattcagcccagaacctgacccatgctaagcttccgtaaggagtagctgccattattctcacacattgtcaatgtcatttcctccactagggaccacttatgctggtgctgatgatattataatataaagcaaagcatctagacagtcacaccctgttcaggattctagcctcccatggttcagaggcccaggtgtggggggagggggaggatgtgtgagtatgtatgtatgtatgtttatatgtatgtgtatggtgtgagtatgtggtttgtgtgtgtttgtggcgtatgtgtgtgaaagccaacagtttacacaaatagccaaagcagtagttaaaaggaggtacagcttcaaagaacatacactcgaaagaagaggcagtctgaaagagcagcatgctgtacaagtccaaccatgcaacaggctggaaaaggcaacgccatggcaccagtaaacgcaccagatcttaacagagaggaattaacaaatggggggggggagcaaattcttccaaataacaacttagaaatttttctacaaaaatactcactgaaaaattacaaaggatgaaaatttttaagaattaaatttacaaaatataaaagctaaaagtgagtaaattggtattagatagcaagatatctaaatatgaaacacattcaccattaatcatcatttagtaataataaaactgatatgtatgtatgtatgggttttttttcatgcttaaaagcaatccaaaatcaaaaccaactaagcctggaagtaggatttggaaggaaacaaaaggggtatatatgtcagaaattatggtagccaacaaaatactacagctaaaaccataataaggaaaagaagaaattaccaatgttaacaggcagacaaaaggataaaaggatattgttttttaacatctgatgtggttgtacacacttgtaaccccaacatttgagaggtgaagggaggagcatcaagacttcaaggccatccttggctacacagcaagtttgagttaagcattaacccttggctacttgagacactgacttgatgtgggataatgttctccttcactgtaaagatttgtcactcatatcggtttgataaaatgatgattgcccagtagccaggaagtgggagaattttgaggagaggaaaggctgagacgcagttgccagccagatgcagaggaagcaagatgagaatgttgtactgagcaaaggtatcaagctttgtggctagacataggtaagaattaagagttttttagtaataagcctgagcaataggcccaacagtttataattaatataagcctctgtgtgtttatttggctgcaggactgggcgggacagaaaaatctgtcaacactgtcaaaaaaagtcaggtagtggtggtgtatacctttaatcccagcactcaggaggcagaggcaggcagatctctgtgagttcgaggtcagcctggtctacagagcgagttccaggacagcctccaaaacaatacagagaaaccctgtcttggaataaaaaacaaaaacaaacaagcaaacaaaaaaaccacaccagttataagacagattattaggttgaattttaaaattccaattaaatgggtatttttttgtaaggcatataccttatcacttgttaagaaatccagttccacaataaaaacattacagaattttttaaaaaatagcaataagataaatgatatttcatatttaactcaccaagaaaataaaacaaaaaaggtcataaaaaatgcctgtagaaattgtattcaagctgggcatggtgacgatcacctactgtgccaattatttgagaggctgaggcaggaggattacttgagtccaggagttttgaaccagtctgggcacaatagcaagagcctgtctctcatattgattatatataatacaaactttcttatagacttcacttatttcactttccatttcttttaatggtttttacattttgtcttatactttttttttaatttaagtgctggcaataccaaaatatctcttggcataatagtaatcacattttaattaaccaacactaagacaaatggaaagtaagcaaaatcaagggccttcttcactggtggaggggaaaatgagctcatagtgactccagtgcatgcatgatgagctcgttagcatgaagggaaaggagtaaggacaggccttcaggaagtgctggtgagagagaattatattcttaaccccacacccactcactcttgcacactttctgtccctttgacaatgaaatctgtgcatatgagagacatcgcccccacggttatgttgccttatgtcctggtggggccagtctcatcacagggccctttaaaagtgcagttttctcctgttggtggtagaggaagtcacagaaactctgtgtgacgaggactgtacgatgccacaaattctgcattgctgagacagcaagggccctggagaacattccccaccaatagccaatgagaatacatatcccctgtttctacagccaccagaactgatctggacaagagcctgcaggagactggaatccaattctcccgaagaatgcaggttaccatcggttccggctaacacctgactcctacctcgtgaaactcttaagcagagagcacagctgagcatcctcagcctcccatctccttagttcaaggcactaagcagctgttcatgtcccttaacgtaatgcttgagactgaacaaagtataacaaacaaatgtattcatgcagttttggaaatgggaaaatataaagagagggggggagggagggagggagggagggagggagggagggaggagggagggagggagggaaggaggaaggaaggaaggaaggaaggaaggaaggaaggaaggaaggaaggaaggaaggaaggaagaaagcaggcagcttttcttcatccaggctgacacgtggcatgctgccccctctgaaggaagaaaggctggaaggcaggagacagagatggaagagtaaagagagagctgctccctgaagtcctgtagtttaggcattaaactcaccagggaaggcagagctcttatgacctaattactttgggggaatgaaacagggtctctctgtgtagccctggctgtcctagaattcattgtgtagactaggctggctttgaactcacagggacctacctgctaagactgaacctcttaaggcctctccctgaaacactgtttcattgacaactaaatctcagcaagagtttgggagagactgtacatgcaaaccacagaagccactctgtccctagtaatttgttatgcaacaactgaaagcgatacaggtgacatttgaactgtcctttgggggttggataggatttcaacatctaaggagaaagggcactctccaggcagaggatagagcatgcccagatgaagagttggagtgcccaggcatagtcaaacaatactgactggctgttcccaggttcctctcagagttaggagcttgaagtaagttcacaaggaaactggagggtcaccaaaaggagtctggattttccccagactatcatgaagaaaagttgatattaaagattttcaatcaggccaggcagtggtggcacacgcctttaatcccagcactcgggaggcaggggcaggcagatctctgagttcgaggtcagcctggtctacagagcaagttccaggacatctaggactgttacacatttagaaagcctatctcaagaaggaaaggaagaaaggaaggaaggaaggaaggaaggaaggaaggaaagaaggaaggaagccctggtaacaacttagtcctatggctaaagtgtataatgtctttagcaatagggtcctggtggacaaccaatagcaatgacaatagcctgtattgttttggggtgtatccaggatactcatgacccaccactcaatggaaaataccccatacttgagactgggctttttagctggcattctagaaggagcattatcctctgtgcaggataccatcattgaactctttaaatttaaaaagaaaatgatttgctttatgtgaatggatgtttaactacatctatgtaggttcaccatatgcaggttgggggctattgaatgtcagaagatggtatcagatcccttggatctggagttacagacagttgtaagccatcatgtgggtgctggaaattaaactgagttcctttgcaagagcaacgagtgctttaaaccacttcagcccgcacatggcttttccaagcatccttagtgctatttatccctcttcctaccccttcctccaccctactctctcatcccacccccacttaaacccccctccccatatcccccatagcacctgtgcctaccatccctccctgttaagatctttctccccacccccaccccccccccccccaccccccacccccgggcccctttctagtttccaggatgtactcagctactccgagttaaacacacagatctgggacccacatgtaagtgagaacatgcagcttttgtcttcctgggcctaggctgccttatgttttccatatctatcaacttacctgcaaatttcatttttctttacagaccaataaaatcccattgcctacaggagccacattttcattatccatcagcagttaataggcatctttaacccacagctcttaaaatagctcatacttgcatagacctaatgaattcttgtgtttggtggtcacatcaccaatcagtcctcttcccagaggcacccacgtcacatggccagtgacagtcctcacgaccaatgtgcccagaactcgagtgttcagagtctactagagaaccaagcttcttttcttgtagagatattcatgatccagcctccactcagcgctgcacgcaacgcacaacagcagcaagaacagaaccgtgtgttttctgagtctgcaacagcaactacagtattatgataaaattgacagtgccaaaatgaaaacacatctgggacccaaggttccaaaggtagagctgaaaatgaggccttaagacttgtcggagctgctagtcagctgaaaactccatgaccactcagtctcccaggcggtaagggcttttggttactggctgcttgtgaattagcaagcacatctataatatatgtcattttattaaattctcacagctccatgacatggttttatctccattttacagaggaggaaaaaaaagaacaaacaacaacgacaaaacctaagttttacaaatctgatctgagtaaatggaggagccgtaattaaaactgagtctaattaattccaaatcccactgtttcctattgtttaaccctgacctacttgggggctcacagctgaagaacaatgggcatcaaatcccaggtcaggattcttccctagaggccactaggcctagtctctcaccattgtgatagcatgagggtttctatgcttgtttacccaaagaacagacatgtgttttgctgcaatcctggtggatcaataccaaggtaactataaacaagagcacgaagtgtgatgctgcctcccagctcccagctccacccatgtgttatgtttcctaagatgactcatcctgtctggtcctcacccttgggccaacctgacaaccatcctgaaggatttcatttgccctgagctgtatctgcttccaccctctaggagtcccacttgaaagaccgtctacctcagggtcctcatgtcacagccattgtttctggtgcttatgagaatctgaaaggggctctccattatgtggtttatagaaagtttagtgagaacacacacacacacacacacacacacacacacacacacacacacacacacacacacctgaaacctgctgtactggggaagaagtttccgaaggtagcagttaatgattcaggtggaaagccatgaacaagggaatatcccaacccattctgtgtggcaacactgcttgctccttctgtgaaaagagagactggaaaacatcggaccagaacacaaggtgtgcctcaggagtctacagactctagtgtgttccattcatgtaacttcccccatttttctgaagctgcaggtagcagttgaggccatggaaaaaagggatcatattgatttcccaacataactaacagacaagtcaactggaaaaacttcaaatcggaagtcctccccaaactcctgaattgatagttagaagcagctaagactgtgatctgctcctcaaatcctgaacattctgaccctgtcatctgctaggctaacataaatcacccttgactgtgacattgatcagttatggtaaaaccacctaaaccaagaatgtgagctattgtttgtgtgactttttctggggtgaatatctgttcacccgagccagggcatggatgacagaccaaaaacaagaaggaggaggaagagaggaaggagaaggggaagggaaagaggaagaagaagaagaagaagaagaagaagaagaagaagaagaagaagaagaagaagaagaagaagaagaagaagaagaagaagagaaaatcctctcaagtctaggcggataggtgagcttactggggttattcacaagatcatgggtgacttaaaggtgctgcaccagaaagcccaccccaagcatgggtgatgacccaccaaagctgcatcctggagcttcctgcacccaccacagataccctcaccccagcagctgtcctcagcttttacagccttgagtaagggggcttaagaatctcataacttcctgtaaagtttacttagctttctgagtctcaggagtctccctctctctagaaggaaatgtttcagtttggcaaaaagggacacagaagtgccagaagatctatcctgggttgggagatgggtgcaagaaggcaaaagtagcccaaagcctgtagccccatccaagatccaagacctttccccaatgtcattggagagagcgcctcttctgatgagaaggcagtttttatcaggcttcataggagcacagtggcaccctcacaatcacagatgaacctctccggggttcttgcttaaggaagtgattttttttattattagaatgattgcacagtgcccctcaactgaagaatggaaagagaaaatgtggtacatttatacaatggagtactactcagcagaaaaatgcaatgcattcttgaaatttgcaggcaagtggatggaactagaagaaacccaatcacaaaaagacaaacatggtagtactcactcatatatgatttttagacatagagcaaaggtttaccagcctataatcctcttccccaaagaaactagaaatcatgaatgactctaagggataaatggaccccaggaatgggaagtggcatgaactcccgagctaattgagagcatgagggtaggggagtgggtgctgccacaataagagcacaagaagaagagtagaggagaagaaatggaggagcagagatattgagttgggggaagaatagaggagagagagcaggatgagagataccatatcagagggagccactataggtccaagaagagatctggaactagggagatcgccagagacctacaaggatgacagaatctgacagtccgggcagtggaggagaggatggcctagaagcccttcccctagaatgagattgatgactactctctatgctatcctagagtcctcatccagtggctgatggaagcagagacagacatccacagaaatacactgagctgaaatctggaacctagttgaagagagggaggaatgaagaacgaaggggtctgtaccaggttggagaaacccacagaaacagttggcctgaaaaagggaaagcatattgaccccagacgctctttgggaggccagtacgggactgatccagccccctgatcatggatgccaatggggaggcccctgcactcctgggagcctccggaggtggactggcattttgccctggtgtgtgtgggggacttcgagagcccatcccacttgaagggatgcgctctgtctctggacacatggggaggggcctacgcccagcacaggaagatttggtggacttggtggagcccctgttaggggccctaccctgcctggggagtggtgggtggatggggtggggggtaggttggaggtgggggagaaggaatgggggtgagggaagggagaggggacttacatgtgaaacaagcctgttccctaacttaaattaataataataataataataataataataataataataataataatagaaaaaaagaatgattgcacagtcacccaagagccccaacactagaaatgatgacagtatgtcttctaaggacatagattagaggtctaggcattctggtccctagacagagaaaccttttctgtaagccattctcctggaattttcataacacatgagtccatttgttagcgtggcaggcacaaacgagtctatcatcagatggatgaacaaaatacacatcctaaaccataatacttaaggattgcgggcctgaagacatacatggctctgcagttaacagcactagctactcttccagaggacagggttcagttcccagcacccacagggaagcttacggccatctgtaattccagttccaggggatctggtgccttcttctggcctttgcaggcattgtagacatgtagtacacagacactaacccatgcaaacacacacacacacacacacacacacacacacacacacacacacgtaatgttgggaattattgtacatccttttgcttcctggtcataactttacttcctctgtgaggcaagccttcttatcccagtcacacattctagagcctcttagctcaaccaggatgtgacttggaccattcttggcttgaaccctgtttcctgtatctgagttcttcctctttctcacaacagccttggggaactgtgggggaacacaaacattgatgacctattaaatgtggattttgtccctccaaagggggtgtttgcaacccatcctgacttccacaagtattattggcttgacagaatgtctaaagcaactgaaaacatgggggcagggctcattattacacagctgccaaaagggatatgcctttagatgaatcatattgtcttcaggagaaacggcccatgatagacatcctacttggtgtcatacctggtcatcatccactcaggtgtcttccagttcctatcttcaccactgtcatcaaacaggccattcactaatccctacagagacctgagacagcccttcctcagcctttgtttgtcatttccttctacacagcagcactcctgtgactctgtctctttaagacatctattgcataccataagtcaaagacgtaagtcaaagggttccaacaatcctaaggcccagtggtgggtcatatctaaacctgctttcttgggttcactttcgttactgtggttttaggtgggggtctcactatggtgtctaggctatacttgagcttggtaccttcctgcctcatcttcctgagttctaggatgacggatatgtgccacaatacgtagctctaatgcatcctctgatagcacacacccaattctaccccagttgttagcaatgagcattttctctctcctctgctttgaagttttgagtcctatcccattcttgcattggttgctttctggcctcgtctacttgagccctctgattttcagcattggacactcgcaactcccaccagctcagagacttatgcagggtttcctgtcccttaattttacatgtctaaatccttatcaccccagcttcttgctctaacattaacctcccccattaactttttttaaaagacagggtcttactatggagccctggctggcctagaactcattatgtggtccaggctggtcttgaacatacaaagatttgcctgcctcttcctccctaacactgagacttaaagacatgtgcccagtcctgaaattctttaatctgaaagaagctttttagtttacctcccaaccaagaagcacaatgtactgaccacaacaaattccaaattttgaatctagactaatggatcaacggttaagaacactgatactaaccctaatcctaattctaaccctgaagacccaggttcaattctcagcacccacatggcagctcacatagttttacaaatttacaaatccacaggcactgcacacatgtgcatgcaagagaaacatcaatgaatacaaaataataaaattataattaattctaaatgctttaatgttgcacaaatgatacttttactttgtaaccaatttggggggggtgatatagtttttaccagtaataactgagtctctccctctctctctctctctctctctctctctctctctctctctctctctctctctctctccacatacacacaccttgtttttgtttgctttcccaacagagtcacacacactatgtagttaaccaactatcctggaactcactatgtagaccctgctggcctcaaactcactgaaatccacctgcgtctaccttctgagtactgggattaaaggcttgcaccatcacacccagctacacacactatttttaatgctaaattgtgagctctccctcaacaatgcaagctagaagattatctagagcttcctctaggtagacgtcagttgtaagtaggaacactctacaccaattgaaatgtaatgttcatataagcagcacctattttgtactcattttgaagagcccttaaagaataaaatatgttgtctaatcagtaactgcccaagcccattttaatgtctgccttccaagaccagcctaacagtaagactgaggccaataaaggttgctgtgtagtaggcaagaaattgtcaatctccgagccccctttccaccaccacactcaactccacagtctctgtccagcctaagatctagaaggccaaagctgctgttgctcttgaagacctttcaagagtaagaagaaggtgggattgataacctccctccttacctctgggacttcacctttgtttggttgtctggcttcctgtcatagcaaatatcctttttatttattattttttgagaaccacaatctttttgcacttttatctgtgtagctggctacatgggattgcatgtacttggctttcatcgaacttacaaaaaaagagaaggcaaactccttggttttgagggagggggtaagaaagacatccaatgctaaatccaaacttaaattgtatgtggatgatcgtgtgtgtgtgtgtgtgtgtgtgtgtgtgtgtgtgtgtgtgtgtgtgtgttcatgtaagcgttcatttatgtgtgggtgcagggggtcaaaggtcaaactcaagagtctctcttaaagagtgatttttttttttttgaaacaagatctctcactgtcctgaagcttgctggttatggtaggctggctgtccactaagcacaggatagctactggtctctaatcaccagcactgggattgcaaccacattccattcattatgcctggcttgcttgtttgcttgcttgcttttagcaatgaatctggagatccaactcaggtcctcatgcttgtgcaagcactgtattgactgaggtatctcatcagctggcactcccaccttccaacttaaatttctcaatggagacaacatctggttttaggcggaaacccctcaagtggtcataaagcaattaaacaccatgcaggaaattgagcaagacactaaagttctaacccagagagcactgctgaagtagctttgatctggggttgttctaaagtctcccatagaacatttagtctcaagcaaaggtttcagagcatctatgggtagtgtcacttaaaagaaacgtctgtctgttggcaacaatggtcttggaaaaaggcaatttcttccaaatctgaacacctacctgtccaatagccaagcaatccacatggtatgtgcacaacagcaatgcaaatatatatttgcaaaagccatatatatacaagaatatttctagccacactatttatagtcaaaaactggaaagaacccaaattccaagcaatgacagaatgaaagaggaaaactagaacagagaaattagcaaggcctcctgccacacaaccttacataatgctgcgtgtaaattcaaagtgggcaaatctaatctaagccatggaagatgggtcatggtcattcctgttgggtgggaagaatagggagaagcaaaagtgaaggctccagagaccagagccactttcatttgttctctctgcctgtgttgtattgcatactcgtgtgtgtgtgtgtgtgtgtgtgtgtgtgtgtgtgtgtgtgtgtgtgtgtgtgtgtgcttgtggatggaggccagcaaccagcactgagtgtcatcctcaggaaagccatctaatctctctccatggcctggagctcacgagctagtctacactgactggccccagggatccttttgtcttcaacccccacttcttagattacaagagcctgcaccacagctggactttccatatgggttctgaagatggaactcgggtccccatgtttgcaaggtacaacttggttttaccaactgagtcatccccctgccctcccatccccattctctttcttgatcaggtagaaaacatggaggtaaatgcaggatttgtatctttctgtatggatattacattacaaaaaaacttttactatcacacacacacacacacacacacacacacacacacacacacacacacttcaaagtaataggggatgagccatatgactaacaccacaactacatttctaaaaatacctgtaaattatgaggtgtttgatacggttctttttcagacagtaaaattatgaaacacagcaagttgtttataagaccacctctaacttctgacaacactgccccattggcggataggaagggcctcagtgaggagaaggggagcgagtgtcaggagctttggatatagcttctggccattggccccactatgatgggaataaaatgagcacagagagaatacctcatctcctgagtcttcaaagccagctctatcgactgaccaatggggacactaccaaagaaaatatttctttctcacccccaacgaccattaactgcctagagctcctcagagtgaggccgagcctcctgagtctctccctcctcagtgatggagtgttgacagcagctttgtcattcccagaaagtggtgttgcatacaacactccaccccttcctcccttcctccctccctcccttccttccttccttccttccttccttccttccttccttcctccctcccttccttccttccttccttcctccctccctccctccttccctccctcttgctcttacattcttcccactcctcttcagggatgttctctgtgtgttgccagggtcctgtttatggctgatcattctacagttacttaatcccatcactttggccagttatccatctctgcccactacagaaagaagcttccatgaccaagcctggtggcagcactaagctgtaagcatttggaggacaattcaacgggcacatcatgacccttcagcacaccaccaccaacagtttcctactagggctggtggcctccctggtcgtcgtctatagtatcaaatgtgaattcttgccgaggagtggacctcaaattcattcagggtgtggctagttaccctgtggttgccttaaaaaaaggaaacttggggactaaaatgtgatatgaacttacttttttactcttttgaactttactacttattgaaaataattacttttaaaatggtgtcttcagaagaataatacaacttaaattttgacacaaaattttgaaattgaagaaataaggaaggatgaaaaacacaacttggcaatgtaataaaaactgctaaaagcgtgtgcttggattttcacgggtaagtggccttcgtgggcttttgggcagggcagtaaatacctagacaaccaactaaaagagaatggtgatttggctcacagtcctggaggtttccgctcacggctggctgtgttgctttcagactggcagagaacagtacatcatggtgggaagaatgtggtagttagagagagctgctcacctcagagcctggatgggaagaaggaggagagaaagaggctgtgggttcacagtcccctttgaagtgtgtccttccctcctcaacagcccagatctcccaactaggcttctcatctttgtgggtctgtgtttcttcagaaataggattaaaatttaatctgaaaatgcaatctgtcctttcagggggacaagttcacacatgaatcatttttacggggagacagaagcaggagagagggaataagagagggcgacaggggtgaaaactcagcgaaacataaggctacacacagaagaaaaatgtcataatggtgctcactattccgtatgctagccaaaaaaaaaaaaaaaatcaattcaaaatgaacagaagagatggagagggaagctctttacaaggcaggtagatgcccacagcaaccacttcttttagtacattttagtgagtgtgcatgtgccatggcccaggggtggtaagagaactttcaggagtcagtccttccctccaacatatggtgtcatgggatctgaacttgggtcattagatttggtgagctgagcctttgccagttgagccagccagctggcccctgacaacttattatttatccagacatagcaggctttgggcaaacgtggcaaccagaaagcattttataacgggaatgcgtaacatgagttatgaaatcatcctttggccctctaattttcatttgaagtgcgaagctcccatgttcctatcagtgctctttatggtcagagcaaaacatgaagcacactgaaacattattttctaaaattaagctatacagaccataccagccctcacacgagacataacaatctgttacaaccagaacgttaagtagtcagggagcacttgtcgaaattttatagtctactcagaaagctcatcaaaggcggaaatgaacttgtatcaaacgagcttataatgcagtgctcgttaggttttgtgaaaatggctgtttaaattctcagaggaaattctgtccatctggcagtcacgacagcagagtagggaggaccagatgggttcggaaatgggtcattcctagcagagaaaagaacacttgaggtaggactgatttttgaggaaccacctgaggtacccatgacagaccgtccacagccccactggacctgttcccgtgtgcatgagttaaagcattaaaggccatctggtggctaaatgagaaaatgacagttcagatgattctgagggtgagggtgtggaaaaataaacaggctctccaattcagtcagcttcacttgcacacaaaagcatcttaagtggctgcagcttggccataaatatctcctccaagtcctgtagcttcctcataatcgttgccaggctcctccgtcacgctgtcactctcaatcaacacactttatctccctgaatatgttgtgtgcagagtacatcactgctgtacgtgaataaatggtcaaaattaggcgctcagaggggctggggagggccttccgtgggtaaagggcttgctttacaagcatgaggacccgagttcagaacccaagcacccacataaaagctggctgtggtgctgtgtgcctgtaatcccagcaccaggaggcagagccgggaggacccttagggctctttagccagccagtctagccaatcagtgaactcctgtccatgaggatccctgcctcagaaaatatagtagacaacgatagaggaagctgctcatcgatctctggcctccacaaatgcatgcacttgtacacacacccgtacacaaacacacctatatttcacaccatagagacttggtagttagtgaaaaatcatccctgtgccccaacaccatctggcattcttctgcggaaacgcagcggtgatggactactcaatacaaaggcaaatcacattatctttcactagcatttcatgagaagttcattcattacagaacatcgttcagtcttcttgattagccttcggaatacttgggatgattaaagagcagcgtttaaattcagatctattttttcccatagaattataattagtgccttctacggggagacctgtcttgactcccgtgtgacaagtcccaatgtgacattaacaagacgttagaaagagtagggaagtctctttgacaaagagtttctgggtggcaacgcctctctcctttggctttgattttgacttccccagctgctgactcggtggaccactcttcacccacctgtcattaaaacaagcagattgtagcgggagtccaaagatatcattttcttcttttcccactcatttaaaccagcgtgtttgtgtaaagtagcattgaaagcaagtttctccagctagactgcaggatgtgaaactggggaatgatttgcaggaagcgccaatctacatctttgggaagtcgcaaaatggaacataccctcccctctctgctctgttacacctgcagactcagtgatggggagccctttggtctttggtctgtttctcgaagctggcccatttggacctcgttaggaaccattgtaaaccctcctaccagacccatttgccacagtgctacacaggctcgctttgcctagaatagttgaaatgtgtaaggtatacataaataaaaggacggttagaaacagtgacacttctactccaccccaaaaaaacatcttcagaaaaacgtctgacatgtgtctaagaaatccttccagttaattggatcctgacattctgttcctgtgtttcttcctccgcttgtcagtgatgaagcatcagaaaaattgtaatatccccaggagtggaacaaactgacaatgagtctcatcaggaagtgtgtaccaggatgcaatgttccagacaggaagacataccacttccgggtatgcatcatgatccaaacgtggtggtacacacctgtgatcccagcactcgggaggctgaggaaagagaatcaagagctccagactagcctgggctacagcaagaccttgtctccaaaaacaagaaactaaatatgaaatcagaccttccacatctctcttctatctattctttatgtaaataagaaaaaaagacacatagcactgtgttaatttaggtttaaaggaaatctgtgtgcaaagggtgtgtgcacatgccatgacacttgtggaggtcagaaaatatcctcaggtgtgtcagccctcgccttcctccttgcaggagggcttctttttcattattgcatatgccaggctagctggaacatgggctcccaggaattctcttgcctccacatcccatctcagcactggaatactgagatgacaggttgcatgctgatgtgtggcttatttcagctcagggttccaggctccagtccatcatagcaggggactcaaagaggcaggatgggaggaggtgttcctatggcatccgtgatcagggacagacagtgattggatgcatgctggcactcagctagctctttcggtttcattcagtgccgggctcagcctctgaaatcatgccaccctcatccagggtatgtcttcccacttcagctaacccactttaaaaaatccctcacaggcacgcccaaagaccaacttaatctagacattccctcactgtaactcccttccagcacaagtcagccatctaaactgacatctgtttccacttgaatcttaacatttacaaaacatccattgcgcaacaggtttgaagaaaagaccaaaatacaaagaagaaactttgttttgttttaggcagatctcatgtggtacaggctgcctgcaaatctgtttgtaaaatgaagcagaaactgggactacggacaactgaggcctggctggatgaggaaagccagttaagtctgtagattgtgagccaaatcttttaagagtcatcccgtgaagagctcattgcccaactagggacacaaaggtgggattgaaagcaagaagagaaagagcatggatccagggtcccaactccctgggtaactcgaccacagccgagttagacacagtcaggggaaggaggttttcctgggcacctgtgtgttgtctgcgtccttccttcttttacctaatctagtggatcgggttatctgattcaggagacaaatccattgacattcatagttaatttatgagctgtgagagctatgttctttgctcctgagctgttacatggctttatatgaagctcacaaatgtttctcagttgtgagaaacagggacttaaaatctcttttttaaagacaagagtcgccttttgtagcctgccatactatcctgtaactcaccatacagcatgggctggactaaaactcacagcagtctccctgcctcagttttctgaatgctagcatcataggtctaaaccacatctaaccaagtctttgtttaaattttattttattttacttttattattgtgtgtgcagaagccagcagacagctttcaggatttggcttacaccttccacagtgggtctgacagatcgaacttggattggcaggcttgctggccctatgttgttgttgctgctgctgctgctgctgctgtatacaacagatctaagctgcttgtgttgttctatatctgtaattcccagaatgcaggaggctcaggcaggaggattgccattagcttgaaaccacctagggcttcatagcaagtatcagggtggcaagggatagattaaaaccttgtctcaagaaactaagacggggaagaaaaagagagagggagggagggaaagaggaagagagggagggagagagggagggtggaaggagagaaggaaggaaggaaggaaggaaggaagaaaggaaggaagggatgtccttctgtgtgctgtgaatatgtttctcttattggttgctgataaaaagctgttttggccaatagacaggcaggatttagccaggcaggaaattccacagggatagagaaaggtaagaggggaaggcagagatgccataaactgctgagggagcaagaggtctgggtgtcgctggtaaagccaagacagtgtggactgattaatagaaacgggttaataactaagaaagagctacccaataagaagcctgagccatcagccaacagtttataaataatataagcctctgtgtgtttgtgtgggaccaaacggctttgggactgggtggaacataaatttccatctacaacgaaagaagaaaggaagaaaggaaggaagaaaagggtcaggtttgttttgtggtgtagttcagtttttgcaagtattctagtcataggaccttggtactttaactgagggaagggaccccagatttcaaaccctattgctatttgatactctctgctacagagaagtttaagggaaggtttggggaaatgagctggttccacatagctttgggtgacaaatggagacggctgacatctttattccaaatgcaagcatatgctgaatcaagtcactaaggtgtctggcaggggcacagccattgctctgtgtttacgagagtgtgctggacacatcagaggctaccgcctgcaaaggccacctgatattctgagtagtcatttatgacgcccataacaaacactaggaggtttttagggccaatatgttctgggaagacacaaactaagacaaaaagattagtaaatcttgactcataaagcacaaagtggcaatggctaaagaaaagcccatgatgaagacatgaaaagaaacgagtcttctgggtgtggtggctcaaacctgaatcccaggacctgggtggctgaggcaggaggactgtggcaagttttgagtgctatccccgcgccccccccccgccccccgccctgggttacacagtgaattccaggcccatgctacagtgtgagaccctgtttcaaaaacaaaacaaaggaaggaaggaaaagaggctgtaaaggctttcagaggtccgaccttaaaagacagttatgtatcctctgtcaaaaacagatgatgaaaagtaacaatggttgttagccatgcccaggaagccccacacagcacctctctacaggctactaaaacgctggaaaagaaagcactcaaggaagttgcatcctaagcaaattgctaaccccccccacacacacacacatacagcagttgacaaaggaggactccatcatatttcatcagttccattctcctattccagacgacatggtttcttcagtacctgaggatttggctcctcacagggcttttggtcagatcaaggagcagcagcaggagcagcaggtctaaactgcactaggtgtgttcgggcctttctggctccatgaggtcaattcctgctcacccacgagacatagtgttgttcttctgtaaaagtttaaaaattagaaaaatgaaaccatgagatggaacacgaactgtagagtacattagagttttattaccgggcgggagagggagaccatgagatggagagagagagagagagagagggtaagagagaagcattagtggtcgaccaccagaaacagaatgggggggaagcaaaggaagaccgaggccacgcaacacacaacactgggccctttgagctgcctaagtatctgccttaatgctatatgcatgtcccacccattgtcagggggcagggtcagcataccaggttccaacacatagtaatataggttaatatcagtctgggatgcacaagagatgctggtttgaaaatgtctctgatgggtagaaaacctgctacatatccatccatccatccatccatccatccatccatccattcattctccttcccacacccacctctattaaacccagagccagacaagtgctctgccactgagggacaaccccagtttacacagaacgtttttattggctttgttctcagaggaaatgctgggtatagtttacgaagctacacatagtacggaccccttttgacatcaccattatgtcacctttgaagtaagaaccaaagagcaatgcagtcattttggggggtgggcggctcttgagccagggtttgagaccagcctgaacaacatagtgataacccacttcccaatagtgtgctaccagtattaagatgaggaaagtgtggttggtggattttcctgtggaatatgcaaaactacaagggctcttggggttatcgatggttttttgtttttttgtttttctagcttttccaagaaggatgcaggatgggtttaccagaagcctgggtctgaagcacttgcctatgaggcttggtttcttctatggaatcttcaagaaaagcaattcgggggttagagctgcagttctgtagaagagcatttgcctaggatgcactaagccctggttcaatctccaacaatggggaaagcaagagagagtgaaaaagagcaagagagagaaagacagacagatggacggacggacagatggggatggacacacacacacacacacacacagagagagagagagagagagagagagagagagagagagagagagacctttttaaagtcaatttctgaaatcgttcagactccaggagaggctgtgactcagagaagttaattaaatgtcctgtaaaagtttttacagccacgcttttgaaaaagtgccttgtgtatttccttctttctcattttagagacatccgggaaggctctggggacactgtcattccacccaagtcctgccaaagacaattggaagaaaagaagctatctgagtgggtcaagaggcacaattatcctgcctaaaaataagttgagtctaagggaagaaaatgaacgctttagagagaaggtgaccagcgtgtcctctctggcctctttcatcactgatttactctaatagcagcctgtcatttcaagccagatgattcagtggcctggccacggcttaccgagggtttcatctgtggtcatccatcctgcctaaaaaatgcgtatttggtcatgcagagaaaagctcgaacctcctgagccatggccagtcaaaagacattggtactttgcttctacctgcacatgggcgttgatggagtcagacctggaccttaagcggtgtggtttatttcttatggtccaacgggacagactctttcaaattttgcacatcaagaccaaaaactgaatcatgagagtctatcatcatgactgcccccagcctctgcactgccactaccttctccagtaggagtgtaggggaacgaattagttggtgtttgaggttggagaagtgtgagttatgaagtcaccatacagcattttcctcgttaattaagaggaagagcgcatcctctcagacctattttctgattgagtcagcagaccccacctagaatctgacctctttgagcagataaccaccgagaaaaatgacttccaggctcatgtccacacgaggctagatgtctgccccaccctagcgtaggacccaggcctcttggatccttgtgacttcttcctagccacaacacatgccttcacctttgctttgcatgcgcacagcttaccttctgcccggttcatacttttcatgtttgggctcctgaaccaggccaatccttacagcgtgaggacaatggaggcattgttagtctgaaatagccaaacccagagttcatgattaatgaggagggacaacccaaggttcagtgagcatgccactactcacgtgtgcacataaggctgactgcgagaccattcatttccttattgcatatacaagcttcataaatcacgggtgttaagactctaaaaggtgacagactttacaatctcagaacatacagagcacatccctgaacgtgtgtttactgccaaggcaggaccatattgctacctattgctgtgccaacaatgccacttactcccaaggacaataagctcagtgttcctttaagacctgagtgctaggaaactacaaaagcgcaaaaattctaggaaactgtcatgcccagggggaacaatcacatgtgtctccatggttacactcttgttgtaggtgttcaaatgtgttaggctgtctgaaaagcaaaggtaatttggacaatacaaggctagaaggaatgttccagaagaaatgttccattgggagcagaaggtttggttggaggacttgcccaggcgctgatcagatggcttccaatttatttctaaaacgagggggggtgtttctagatcatgctctgggtcaaagaaaaccacctcagaagttactcagtgcaactactaaccttccagggacacagagagcttcctggttaccaacccacaccctttccagatagttcttagtagggtgccctcctttctgcactatgtgaattctagcctttcacaagacatcacccaaactcactccttcaacccagatggcagtttgcatttccctcctgtattccaggttcaaacattgtgtcatcactagcttcccacattccacacctcaagtttcccacctcttcgccatttctgtcataagctgtcattacccttctcaaagggagccatagaggagaccgcagaattcactgacaaacaccaagaatagggggaaccctttccaaacacacttcctctcctcttcctcttccctattctgggcatttgctcctattaatgtagcccacgtcacattcgtaccatttgagaggcagtcatatcagatcattgaattttctgatcttatgctctttcccctatatggagattaagcaacccttcctaaattctatgtccttccattgctggtttcttcctgaatatagaactttgcattttacttcttctgaatttcatcttgttagtgttgaaagatcctataaggagagttcaaggcaaagagaatgtaataatgacctttaaggaagaaggaacaagaaatagttccagaaaagcagaggggtcattgtttgttttctgttgtagtgataaacagcatgaccacaagcaactcaagaacgaaagggtttatttcaccttgcaggttacagtccaggcaggaactcaagacaggagcttgaagcagaagccacggaggggctcacagtcagctccctttctcatacagttcaggcccacctgcttggaatggattgaccatagtgagctaggccctcctatatcgattagcaatcaagaaaatgcaccacagacatgcccacaggtcagtctgggggagtagaccctcaagtgaggctccttcttccaaccagcatcaaagtgacaacaaagaccagaggctccacagacttagataggaagcctagtgaagggaccactaagagggaaaactgaaccttgtattcatttttgctcccttttaaagtcctaataacacaactcgtggtgttttgctttgctttgttttgttctaaggtacagatttacgaagatgggattggaaaagctaggactgagaaactgtgatcaacacaatgttagaatcttggaaattgatgggtaaacgggaactgtgttagctcatctgagaaaactagttgggaagcaataaagaattttatatgctcccccaaagttaggaagacagggatcagtagtatgaggaaagctgaaaataagctcagtgtgtgaggtagcaggggctggaaggaggtgtggtggttaagagtgctgctgccctctcagagaacctggactcccagcacccagaacctgggcatctcccaccactggtggcttctgctccaggggatccagggcctccgtggggacctgcactcatacgcacataccaacatacagacacatattcataattgaaaacaaaacattttttaaaacaaggttaattgattccccaaaaggaagggtttatttcagcttacaggttaagtccaggcaggaactcaagacaggagcttgaaacagaagccatgttcacttggcagaagggatactgtgtggacaggaaggaactgtgaggccacaagaatgttttcaggagattgaagggaattttagctcagcctcttacccaccaagcattaaaggattatctcctgtagaagttaagcaatccaagaggaaagattcagactttaagtgttcctcaagagcaaatacagaccagaaacaagtcccgcccacatatgcagagccccgcccacatatgcagagccccgcccacatatgcagagccccgcccacacatgcggagcatttaggctgcaaggctgtcttctgtaaaagtaccaagcagcacatgatgaagactcccaagcatatgagacaaaccataataaagcaaaagagagaaagagggagagatgagagagaaagttatcacgaagctacagttagcatatcagaaagctaagaagatacactcacaagatgagcaaccattagcagacatgaaactctcagttcaagatttggaaaaccaggtgaagaaataccccagaaagcaaaataaaatgacaaagagatggagtctgagattttgatgatgagaaaaaaaaaaaatatatatatatatatatatatatatatatatatatatttcaagagcatttaacatttaacaagaaagagttatcaggaaaaagcctttaaagttaacagaaaaagaaacaggcaaataggagaaatcatcaaagaaataatcccaggaattttctcagaacagcaagttttctgctatcaatggaaagggtccatgtaatgcccagaacaataggaaagagaggggggggaggaagaaaggaaagaaggaaggaaggaaggagttcgaggccagcctggtctaaagagcgagttccaggacaactagggatgttacatagagaaatcctgcctcaaaaacaaaacaaaaaacaaaaacaaaaaacaaaaaagaaaagaaaagaaaaacagccacattctacacccatagagcctcaccaacatgactgcctacatacaagttaaacaaggacaacaaacaatgtacatgcatttccaaagtgcacaggagaaggacccaaatgcctgcacaaataactacaggcaaccaaggcatgctgagagcagggcaaacagccttctgcaaggaagaacacgtggattggttacccaacatcacctgggaagataaaatgtaacattctgcagaaacgagaagaaggaagatggtgcattgggtcatattggacagagccatctctgtacatggacccatgctgtagactaagtcagaaaagaattaaaataactgtttctggttttaaaagaaaaaaatggaaccaaaaaaaccccacatatgcatgacatgtacagacactagagataaagagaaggttataaaaactttcagaatagagagtggggatgtataaagatcagaagatagtatgcttgggaggacccctgctttctgaaggctgagagaaaattgtctacaactcaaaattctatcaactcaacataaagccaggggactggagagatgtctcagtggttaagccatctcttactgctcttgcagaggaccgaagtttgattcctagcacccacaactgcccaaaattcacttccagagcatccaacaccctctgttctctgtgagcccttgcacacataaactcatgcaggcacacatacatacacacaaatgaagacaaaaatttttaatgaccttcaatatgaagccagaatgaagatgctttcagttttcacacatgaattgtctgaacttaagtcctagcatctcaggaagttcgtgtagaacatacatcagcaagacaaggcggcaacagaagaagacagaagacatcaacccaagacacaggcatgctaggatcacactgaagaagcatcctgggacgagagccatccaggaggcccagagagcagccaagccaggccagagcaagtgggagaacacgggaaagatttcgagaagaagatgaaaatgacagatttaatgctaagcctgagccagcaaggagaggatttagacagccacggagagcttgtggttaaattaattatactttagaagacatgaaggggagaagaacacggcagttattaacctcagagaaaatgaaacgttgtgcaagaaagggcagaagatcacagcgtgccacggggctcgtctgcaactattattaacagggttataatgaaaacatgaagtcctggccccaaccagaatgggatgggagtggtccagcttcatactgggatgagaacaacgggtatttcccacttgtatatggtagtgttgagatggggcagtgctggaactgaatgaaatgtttctcttccgtggttagaagctgttagtgcaaaacaggaatactaggggtaagagtaaacccatggtgtttagaaaaaggaagactgcgctgggaggagttcagtgggagagtaaatccatagtgtgattaaggcctgaggggcaggaagagataaccatcaaagaaaaaagagatttatgaacttcctctggatggagaattcacgtttcatagcaaactgtgtagattatttgacttgttacatgtacaatagctacaattatatagtctcactctgaaggacaggctagacttacacttgtggttatccttctgcctcagcctctcaagtgctagaatcatagacaatagtcaccatacatgatataagcaacaacaaaacacaactaatttgaaacgagaatgaataagtgaatgaaggaaccaagaaagtcatctaacttaaaacaattgattaaaaacaccaacaaggaacagcagataactggggctgggagggaacctataatgatgaatgaagagggaagtgaactaaaccaattcttcaagaccgagagaggtccgaagtgaagacaagagtttgaacacgggcctagatctgtggggaggaagaggcggggccactcaccaccaaccactaagctctttctcgattgtatgccctttgctcctactctatcttgctctgcttagctggggccagcaacatcaatgtcctatagagctggaaatgtttcttacttctaaacttgtacccttccaatccactctgttggtggatagtcaatcacactgtgaaccccgagtttgcctttgcattaatgaaataaaagtaaccttgagtcaggagggtgagttagcagctagttgacaggaagtaatcatggagcatcatagggcatctggaagagacagagagatgcaccggaagggtagagaggggttttgagtggcacattttcattgttgttgtcatttggcagagcagaaggacaagctctttgggagatgccagcacagagagaaggttaactaaactactaaacttctctgagatagcagatttgcaccccagcctttgcgtctccagctttatttataaatagaaagagatttaggtaaagctacagttagcagcagcagcagggctggcacctgcaagaacacaattcctgccaggtggtggtctgagtggccaggccactggcagaggagcaggccagtaactgtggctgaaattgcagtacagtaaggtgcagccactgtgccgaagataaaacaacactgctcgatgcagaatgccctttctaaaatagaaatccagggtgctgtcccccacaccaagtattttagtggcttctcattaccttggtggaagatcaggtgatgtaaagaggtgaggactcttggatggggtctctgggatctcttccctccactgctccgttatacaaagacggtgcccttcctcggttttaccttcatccctctccacacttgccccataacgggcctggttcctctgcttctttaggacatggctcttacagtgcactctctgacctcctatgcagaggttcccccatccagagctctgtgtcgccgccagagcattcgacagcttaactctagtttctagaaccctcctacttgactgtagctctataaactccaaggcagtatctgttttaatctgtcagcaaaattccaactctccacctctcagcagctcactgatgggaatttctcaactaattcgtttgttatcctggagtggagccactgtcaccatgccaaaatgaggcagaactaccctctcgttcttatccattctggtctctgcgtaggtcctactctctccactgtttcttatacttccagctttaggatttgagaattcaaaaccagcatgtgtttcctttctgcctccagcagaagagacctaagaactaattcagtttgctagaggctaccctagtacctgaacaaaggagcaagtatatggactagccttgggtgatcatagccaaaggagtgaatggaccatcctattggccaggtttggatctattgccaaaagaaggaaacactccttgccacactttctgtgtacctcattgcccaggaagtgaatgttctgttgacaggaaatgaatattctgtgactgttgaatagacttatgtgcccactagtgcctgctactgtgtctgttgtgcttgctgaggaaaatttagcaagttcatgagtattttttaaagtatggtggcacacgtctatatcagctactgggaaagccaaggcaggagggtgtcaggctcagtgccagcataggaggggccagtgcaaaagaaagtccttttaaaaaaagaaaggggaggtcgctcagtggttaaagaacatgccacaaaagcaagggggcggagtctggatcggcagcacctgtgtgaatgtgaggtggacatggcagcccgcctacacccataattccagcttcggagagtgattgacaggggattccccagagcaagatgttagccatatctacaaaatctgggcttaactaggaagcccgacctcaaaagagtcaggtggaagaatgatggaggaagatggctcccatcaaactcaccactcaacatgaatgtgtatatatgtgtcttatacatgtatacatgtatacatgtatacatgtatacatataccccacacacacttaagaacatacatacaaatatacatgcaggcgtcacacactcaagcacatggaaagaagaaaaagaaccaaaaggggctatgaggatgctatctcagtggttagcttgtctagcacacctgagattctaggttcactctccagtaaacaccctccccccatagcataggaaaggaagaaaggaagagggtacagggatttgcttcagtcaattagtcaaaataaaatctcatggtatcaaatgtttatataactcttgtggcaagattccaaatgcttcttgtgcactaactcacttcatcttcaaaatgacttgatgccctagattctattcatgttgttgaaactggaattgtatccaagttactgaatctggagggaccagaaacagatatgctgaggaatttggacattatggaggcagagagagcaagtagctgtgaccccagagaactgacctgtccttatccagcagattccacaaggactcaccagtgactagactctcctggagagactctaagggaacaataaatactaggtcttggacatgtcatatcaggctctcctcatagacaccaagccatagtcacacagaaagagcctccctgaattaaggtattctcttgtgtgtgtacatttatgtgagcatagatgcaggttttgggggtgtacatgcacagtatgcactcacgtaaggtggccaaaagataactttgggtgacattccttaggcaccatccttgtttatttattttccattcagacagggtctcttattggcctggaattcatcaagtagtctaggctggctggtcagtgagctctccatgttagcaaagcaactccgctaactgagctatcttcccagccccgatggtatttttttaatgtagggcgcctcaaactatgtagctgagaatgatcctccagtctccatctcccaagtgctgggattgcccatactcaccgtcacgtccaactaagaacattatcctgatcctattattttactcccctctcctctttgtcttggcaaacacttggctctgggataccacaagtgagggtccctcaaagcaaattgccctctaccctccaaactaagacccagaaaaagtgactgacaaacaggaaaggaaggaagtagacagcaaatgagaaccgaccaactacattgacttctcagtatggccaacactgatccgttaagacctttttattcagtcattcaaccaggcacagacactagtgtcacagcaatgtctcactagtcccccctgagccaattctgcccacctacttcatgctgtagttcctcaaggtgtgctagttttcaaaacagagtcagggagaaaggtataagataagatgtcaaaactaggactctattgggtgaccctctgagcagcccatcatatcctatgccatagactctggcttgtccaattcatccaccttaagtggtgctcagcagaccagtgatacatttttagcatggaataggaaataagtaagtcaaagggcagcgaaaaccctaaacccaagaaatcttaattctgcatccctggtcgtgttaaaggagtacagccacctgagcctagaacctaatctcctgtgacttacggcaccattgctcatgacttatattcctgagtattcaccctggtactataattagtttactttctgtctgggagttacctttttctaagaaaaacttaagggagaatgctactataacatcttcaggagaaatggaatgatctgtatggtgttcgctagccttcacaaaaaaagggatttgtacgaagaagaggaggagagaggagatggtggaagagtgaggaagagtgaaggggaagaggagaaggaagaagacgtagagatagaaatacaaataatggcaagcaaaggaaaacactaaagtggcattcagaagttctctgtgtcaaagaaataacattcaaaatatgtatgctgagactagtgttttgcaggtgaaagaaaactgtgtgccatataaatacttacaggaagtattgggtttgttctcaagctataaagatgaaggtgatactgtcagacccagtgctgtgacataagggtgtgtcaagctttgtgacaagaaccatttcctgcaagagtttagaatgtggtaaaaccacccatttaaaatgaactactgaccaacaactgactctagataatgccaggaacacatcacttcattttgacggtctcttagcctaacctaatcacaaatttcctttacattaaagacagttctgacgtttgtcaacctcgactgtctgaggagagcattacactggtggatattttttttatgatggtcatataagaaatggaagcatgggaggattaatccatttttcctgggtcagtgcaatggggaccagctagaagccctcctctccaatgacaacagccctcactgacactccaaagctcaaccttcagagacatcttaggtctctgaactatgtaaatgtaaatgggaaggaaactgggttttaacgtttgtagtgcttgtagcgtgtctttctggattttggtggcaatctcagtttaggtttttgatatttgtgtctctctcttcaaagaaattcctacagctatctgtacttgccatgagtgtgcataagctttgatgttaacaaacagccgtccaccaacttgtctagtagacgtggcatctgagggccatttatccatgctgtgcatgtttggagagcaaccaatgcgtagtgccaccctcggtgatggggcatcagtgggcatctgcggagcccaacagacttcaagtcttggtttcacctctaacctgagacaaattccctcacctccctctgcctcggttgcctgttgtgtgaagagcctagggaatgttgtggcagtttactttccatcgtcaggggaaagggaaaaaaagaaatgcaaaacatttgggcacatacacaaattccagataagcgatccttctgttctctcaaaaagtaaagctatcagtatttcctgtaaactccttcagcaatcgcacttcttttctgttgtccctggggtctctgatgtgtcatgattctttggagtcattgtgagttttgttttgttttgtgtatttgcttttcattcttttgtttgttttgttttctgctgttgttttggctggtgttgtttgattgcttgactgagtcctgctatctattcaggttggcctcaaactcacttcagaattcaaattggccttgaactcaagaatctccttcctcagcctcctccaggctggctcttttgtatagagtcaggaccggttagccttctggtacatcaacatgatcatgagctagaagtatacctgaacttcaatgtccagagatttcatcagcttttcataataactggatggctcactgcatcactggtcatgtggctgattgacttcaagcactaaccttgtctgtttcctgacagtcaagctgaaagctctaaccctggttaatcacatggttggtctttccagtacagtaccctggattctgaaactgtatgagacgtgactgacagcgctcatggtgactaacacagtcactcctgtaacttggccaatccaacaaggtggtagttatctcttaagagccggaagtaaagaccgaactttttatttgaaaatattaagttactgaaacctgggactattgtcttgatagcagaatgccctccatactggctctgatgaacaaataccaaggtactgaaggaagcctcaggtaacacacacaggaactgaactcaatgacctaatgggttgagtttggttgctggttgctcttccccagtataacaaggctcactgtagccttgtgagatacctgaacagaatgcccagataagcctatttcagatttctggctcttgctattaaatatagggaccggtatatagatgacttagcatcagttaagagcactggcttactatatatatatatatatatatatatatatatatatatatatgtgtgtgttttgcctgcatatatgtctgtgcaccatgtgtgtgtgtggtacctgaggaagcagaagaggggattggagcccctgatactggaattacagagagttgggtgctgggaattgaactcaggtcctctgcaagaacagtcagtcctcttaactgatgctgagttatccatctctctagcccctatattttattttaacccatcaaatttgaaggtaatttgtcacacagtaatatgcataattaatgtattagccatgtcatgaccaaaagctagtgacatcataaacccaaggaacctagattagcaaatggcccttaggtacagcaggagtcagtcctgctaagcacaaaaccatcaagagtctgagcttcctgtctcccaagaaaagctaaaaaaacttagcagtggttcctaacacctagcaatgctcacctcaaactgaatgccagccgcagttctatgtgcttaatgcttttaatctaatttaattaaaaaattgttatttttgttactgcatacaaggaaactgaggcccagattaaataccttagatcaatcaggatattaggaaacttttgattggttgggttttgttgtgtcagcttggtctgttttttttgagacaaggtcttattatgctgccctggcattggggaagatttgaatttgtcattaatcagaattcagagtggatgcattaaaacactgcagagactgcttccaataaaagttaaattatactaaattacctgttaattaaacaggccctatgctgggatttggtagctcatgcctttaatcccagcactgtgaaggcagagacaggagagtctctgtgagttcagtgccagcctggcctatagagcaagtgtcaggacaggctccaaagctacacagagaaaccctgtctggaaaaaacaaaagaccaaaaacagacaaacaaacaaaaaaaaaaaaggtcccatagttcctattaaaatttttactttatgtcattgtttacaaaaaaatgtaaagtatcagaattcttctacaataagtggatacatccaaatgaagagaatgttagttagttagttagttagttagttagttagttagttagttagtttttctggacagagtttctctgtgtagctttggagcctatcctggcacttgctctgtagaccaggctggcctcaaactcatagagatctgcctgcctctgcctcctgagtgctggggttaaaggcgtgtgacaccaaccatctggctaaagaacttattctttttttaaagagcacagtgaagctcagaacaaaccgaatggtttaagttcttacttattagggagtcagaaagctggaccatgagttaacaatcccaggacaaaggaaaaaatatgtgctcaattttatgtggcacacagtgctctcaaagattaaagccatttaatcttctgaggaagagcatgtttattcctggttgaaaccagaggaaaatttcctgtacactctatactccaagaagttatatcaactcccttctcgcagaagggaacttgtaacaaagcaaccattataaaaacatgtaacagtggaaggaaaaaaaagacaaaacatgaaacaatgctaacagctcatagctgcttactcaactcctccacagattttaaaataactggaatatcttttctctctctctctctctctctctctctctctccttttttttttttgagacagggtttctctttagccttagctgtcctggaatttgctctgtagactacgctgacctcaaactcagagatctttctgtctctgcctcctgagtgctgagaataaaggaatgtgtcgccaccgcctggctctcctttttatttttatttctcaatctgaaaaaaaaaaagtcatcctactcttgctgtctgctgcttggcagtttgtgcatgggttgagaagctgtgagtcttgagctgaaagagaaaaccaagtttgaaactgctgttagggcatggatcttacaaagagcgaagggcgggggaggcaagaagatggctcagtgactaaagtgttcactgtgcaagcttgtggacctgagtgtgatctgtagcaccaagagtgtggagagcatctgtaaccccagcgctggggaggtggagacaggtggatctcgacattcactggccccctaaatcagatccaggttcagtgacagaccttgaatcaaatgacgaaagtggaaagcaactgtggaagatacctgacattgactgactgcacacatactcgtgaactcattaacacatacacatgaactcatacacatgaacacatacacatgaacacatacacatgaacacatacacatgaacacatacacatgaacacatacacatgaacacatacacatgaactcatacacatgaactcatacacatgaactcatacacatgaacacatacacatgaacacatacacatgaacacatacacatgaacacatacacatgaacacatacacatgaacacatacacatgaacacatacacatgaacacatacacatgaacacatacacatgaactcatacacatgaactcatacacatgaactcatacacatgaactcatacacatgaacacatacacatgaacacatacacatgaacacatacacatgaactcatacacatgaacacatacacatgaacacatacacatgaactcatacacatgaactcatacacatgaactcctcatacacatgaacacatacacatgaactcatacacatgaactcctcatacacatgaacacatacacatgaactcatacacatgaacacatacacatgaacacatacacatgaacacatacacatgaacacatacacatgaactcatacacatgaactcatacacatgaactcatacacatgaactcatacacatgaactcatacacatgaactcatacacatgaactcatacacatgaacacatacacatgaacacatacacatgaactcatacacatgaacacatacacatgaactcatacacatgaacacatacacatgaactcatacacatgaactcatacacatgaactcatacacatgaactcatacacatgaactcatacacatgaacacatacacatgaacacatacacatgaacacatacacatgaacacatacacatgaacacatacacatgaactcatacacatgaactcatacacatgaactcatacacatgaacacatacacatgaacacatacacatgaacacatacacatgaacacatacacatgaacacatacacatgaactcatacacatgaacacatacacatgaactcatacacatgaactcatacacatgaacacatacacatgaacacatacacatgaactcatacacatgaacacatacacatgaacacatacacatgaacacatacacatgaacacatacacatgaacacatacacatgaacgaactcatacacatgaactcatacacatgaactcatacacatgaactcatacacatgaactcatacacatgaactcatacacatgaacacatacacatgaactcatacacatgaactcatacacatgaactcatacacatgaactcatacacatgaacacatacacatgaacacatacacatgaactcatacacatgaactcatacacatgaactcatacacatgaactcatacacatgaactcatacacatgaactcatacacatgaactcatacacatgaacacatacacatgaactcatacacatgaactcatacacatgaactcatacacatgaactcatacacatgaacacatacacatgaacacatacacatgaactcatacacatgaacacatacacatgaactcatacacatgaacacatacacatgaactcatacacatgaactcatacacatgaacatacacatgaactcatacacatgaactcatacacatgaactcatacacatgaactcatacacatgaactcatacacatgaactcatacacatgaactcatacacatgaactcatacacatgaactcatacacatgaactcatacacatgaactcatacacatgaactcatacacatgaactcatacacatgaacacatacacatgaactcatacacatgaactcctcatacacatgaacacatacacatgaactcatacacatgaacacatacacatgaacacatacacatgaacacatacacatgaacacatacacatgaacacatacacatgaacacatacacatgaactcatacacatgaacacatacacatgaactcatacacatgaactcatacacatgaactcatacacatgaactcatacacatgaactcatacacatgaacacatacacatgaacacatacacatgaacacatacacatgaacacatacacatgaacacatacacatgaactcatacacatgaacacatacacatgaacacatacacatgaacacatacacatgaacacatacacatgaacacatacacatgaactcatacacatgaactcatacacatgaactcatacacatgaactcatacacatgaactcatacacatgaacacatacacatgaactcatacacatgaactcctcatacacatgaactcatacacatgaactcatacacatgaactcatacacatgaactcatacacatgaactcatacacatgaactcatacacatgaactcatacacatgaactcatacacatgaacacatacacatgaactcatacacatgaactcctcatacacatgaacacatacacatgaactcatacacatgaactcatacgcatgaactcatacacatgaactcatacacatgaactcctcatacacatgaacacatacacatgaacacatacacatgaactcatacacatgaactcatacgcatgaactcatacacatgaactcatacacaccacacagaagagggagaaggaaaagaggttgtagtttcctaaagaaataaactacttagtttaaacttcctgtgtgtgtgtgtgtgtgagtgtgtgtgtgtgtgtgtgtgtgtgtgctgcgatttcactattaaagcacactagattccaacacttatgtcttctctttctgtggctgcaacatgattatttttaaatctctgctgtgaaatctaaatcttccattgccaacctcaacagcccagctggggacagtcctgccccacgaagctatttgaagtcattggctagcctatttaaatggtcattatttcctggagtccggtgaccttttagaaatgaagctgttagatggttacagaggagctattaaaaataatatcaggaagccaagggacgtaaaacaaagacatgagtaattgctttggtttgggatcattaaatatcgggtagccataaaaggcaagcactcacttaaggagagttgcgatgagggagcactaccctatgtctttccaggacattctttagcaggtcagtggttatggttagtatgtggtcatcagactagatgactggttctcaagagtgacaggggtggggactcacattgcaatggtacaatacagttcacatttgggaataggggaatttctgttgtaaatttttttaaaagtaatgctcaacacaacgtattagggtgcagaaaatatagagaaaggttggctctgaaggccataagaaagtagaagcagtgggaccaggcacagtctcttagggcaggacttgagagtcctatcattactttgcaagaatgaagatttcaaagatgaaaactgtgatgtgagcaggacttggcagcacctgcctgacatataagtgttcactaggcggagacaggagactctcaagatgaaggtcagcctgggttacacagtgagttccagactagcctgaactacctagagagaacctatccataaataaataaataaataaataaataaataaataaataaataaataaataaatcaaatgcttggatttggacgcccgtgcgtcctgccgctgctctctaaggtggctttgcccctgcatccgcacagtcacctgctgttccccttgctccatctgagctccaaaaagaccttttcttggccaggcgtctgtggcgcatgcctttaatcccagcactcgggaggcagaggcaggcgagttagagaccagcctggtctacagagcgagtgccagcataggctccaaagctacacagagaaaccctgtctcaacgccgccccccaccctgaaaaaggccttttctttttcgcaccccacagtatcttgattggaactgcatgccaccacatagctgttacccaaatcaaagaaatgcacttttaaatataaagatgtggaggaaatgtattgcagaaggcatacaaacattttaagaatgcaactagttgctcaatttctatcagtgataaagtacgttgcgtcccaaatattaatcatcctgaatttaagatattaagactccttgacttattaatattgttcctgaaaaattattcaaaaatgtatccccaatactgcaaaaagtcttatgtaggagttatagatataagctattacatcatttatatgtcaacaaaaacttaaaaacagcaaaagtgttcaatatttggaaagtaaacagatcagttatagacaattaatgctataacagttgattgctattgtctgaatatttgtgtgctcctaaaattcatatgtcaaaacctaatcacccacaggataatcctgaaaggcaggaagaggctgggaaatgactctgctggtaaagtgttcactgtgtaagcatgaggacctgtgtttgggtcacctgcatccatcaagaagcccagtgcaaagatacacaccagtaattcctatgctgggggtcagagacatgaggatcctgagggcctgctggacagtcattctagctgaatcagcaagctccaggctcagtgggagatcctgtaataagccctgctgccaagcctgtgaacctgagttcaatcacagggactcacagagtggaaggaaagaaccaactcttttgtttgttttttgttttgtttgtcaaaacagggtttctctgtgtagccttggctgacctggaactcactctgtagaccaagctggccttgaacttagagatctgcctggctctgcctcctgagtattgagcatgtaccaccatcacctgactaagaaccaactctgagcaagattttctttggtcaccatatccacgccatggcaacaaatatgtgtgtatgtgtgcacatatgcatttattcacaccaacacgtgctcaccaaaaatatgtagatggaatttatatatgttatttcaaaaattaaaaaataaaggtcagccatagtggtgtctaccttttatcccaactctcgggaggcaggagtgaattcaaggccagcctggtctacatagtgaattccagtacagttagagctatctagagagactctgtctccaaagcaaataataataataataataataataataataatattgacagacattaaggaaaacaacgaacatcaaacttctgaaccccatatgcacatacatgaacatgcttgcacacacacaaaaaggtcttagtaagttactatctcctaagggtggagcgttatgaacaggactagtgccctattaaaggggtccaagggagctggatatggtggaatgcatcttaaattccactactcgggaggcacatgcaagcagatctctgtggatgtgaggccagcctggctcacataacaggttccagactagtcaagacagtacagggagaccttatctcacatcataaacaaaacacaagacaatggtaacaaaaagagggctaaagactttgtttttccctgttagtatggagaacacgatgagaaagcattatccatgaaaccaagtgggctgtctccagatagtgagtctgctggctccttgacagtctactccccagcctccagagctataagaaacacacttctggtgatggtgaaccacccactttaggatgcttttgctacagcagcctgaatagactaagtcaacaattttatgtcacaggagggaaaggaaaggtatttctgatgtttaatgtaaaggacgaagatgagggatgtgttccgttggtagagctcttgcccgccattcacagggacttgggttctgttccccagcatcatgtaaccctggcatggtgaagagcacttcagaagtacaaggtcagccttggctaaatagtaagttcaaggtcagcctgttttcaaaaggaagaaaaaagaaagaaagaaagaaaggaaggaaggaaggaagaagaaagcctagaagaatctgaatttgtatcactttgtctttatatatacatatgaataggattataaggaattaaagaaaagtgacactgatatattagaatagtagaaatacaattagattacatcttaaaatttcctttaattttgagtcaatagattttcgtaagaaaggaaatgtgttaccaaataaattgtattcttggctcctgaggccactattcagcaatatttctaaagacagagttttccaaactgctgaggccaaagactttcttctagttcaatatacaggttcccaggacccagaccagttagattcactgaaccttaatctccaagggaggtacccaggaagctttgtctttaatgagcactgatgatttggtaaccactaatttagggcaccaaatgacgtcaccgagacttgaaagagtcaatataatcttcagtccaccaattgattttcccaagtatacgtttctcattccactctatccctcttattacagaaccacagcctggttcttccaggcgatcacaaggcagcaatgttctcaagtaatacgaggtaacagaagggaaatctgagcctgacttgggttactcggtgaattacaggtgtagagtggatcaagatagtatttaaaacaactgaaagcagagggggggaaaactactgtttccttaaatagcattaaaatgattgcattgacagatcaaggagagggcagtgatagaaagaagtgaataagactgcagatctgatctccttgtgaggaggagagtctacttgttgaatttcctacacatcctcaacccatgacctcgctgagctgccaagtaaccaaagcctgcccggcaactgaactcacatgctaccaggctgaactctgaagcagttccaaagaatatggaggtatttcaatagcccatctgctgtattaccttagttgttctattaccagtaaagacttgggagtcagatattgggctgaaaacctgatagatcaaagaagctgcaggggagcaaccaaatgcccttctctccacacttctcagaccaagaaagggatgacaaaatcccccaggagtctccaagtccctccctactccttcctgtgcccttctctccatatcctgggtcctttgtagtctctctgactaattcttgccgagtagttgctggcttcaccctgtgtcaaggttaacttattaacacagtctccacgtgtcacagtgcaagcaaatatcctgcgacaccagtcaaatgaattgtgtgaggctgtggatgtagcttagtgtggacaggctctgggttcaatctccagcatggaaacagaaaggactgtgtggcacataaaggagacccaagagaaaaaacagtacaaaagaaaaaaaaaaaaaaaaaacaggccaagagattcgttaagaccttgaaggaagcagtcccctcttcagacaatggccaaaccgaggacaagttacttagtatcattcactgtactatacaagaccctctcgattcttctattttgcagggtcctcctataaaattagagcccttcctgtcctggaagctgcaagcccacatttagcatcagagtccagcctagaacctgcacctttctcatcagcccccacctcctgctctctgcagagatttattattattattaaatataatgttttattaactatttgaggattccatattcacccttacgcctccctttaactccttccacgtctactcccacccttcctaactctgtatcccttagttttttaataacccacagagtccaatttgtattgcccatgggtttagggcccccagtggagcaaaataatctatgagaggccacacccttaaagaaaggtgcctctccctcctgcaaaaactatcaattgtcagtagtttctcagacagtgatgggggctcatgagccacactggagcgttagttggcttcatcttgtgctggtcttgtgcaagcaactgcagctgctctgggttcctgagtgcagtggtcctgtcatgtccaaagaacactgacttgctccattccttctggacccctggctcttagcatctccacccctgcttctgtgatgagctttgcacaatcccccttttttggtagggagggtgatattgtcctctgaaactatcgtcctgacaaatagtgctcccaaccactgggcaaaatgtcttgtgaaaagaatagtgtggttaagatcatgaagcctccatatcacgctgggttgctggatattccatcctaatggtcaaattttcctctagggttgtacctagtaccccttatcccagcctttgtcattgctttagtcagcataaaagatagctggtacctgatgtcatttgactgacactcagaatgtgtggtacctgtgtgcacctagcattttgtgatagtgctgtgcataaaaatacctttcaagggcaatcattctcttaaatttcagagtaaacaatgccgtaagcagctcagaacctaatcaggaaaggaggtatctagctctttataaggctctcatggcctctgttttataagatatgttcacttccaaaccataactattagttcagaccccataagccaaatcaagaaatgtttcagggcctgcaaaatggctcagtgagtaaaggggcttgccaccaatgctggcaacctgagttcaaatcataggatccacatggtggaagaagagacctgactctcaaaagatgtctctgatatatggtggactcacttaactttcctatggcaccattttatttttttttatattgaagtccaaaataagtccccagcagtggtacaggacagacagaagacaccagagaccaggaagtgctgattaccatcactttaaaattgtagagtcatcccaatgatctctatctctttctcttgattttttgagacagagtttctctgtatagcctagcctgttctggaatttgctttatataccaggctgacctcaaactcacagagatccactctacctcccaagtgctgggattaaaagcatatatcaccatgcctagctttatctggcttcgtttgttttctagatattttattttatttatatgtgcattgccatgggtgtccggtcccttgaaactggagttacagaccggtgtgagctgccatgtggatacaggaattgaacccaggaagagtaatcagtgctcttaactgctgagccttctctccagtcccatctgacttttcttaacatgggtttggggatcaaattcatgccatcaggattgtacagcaaacacttttatccactgaaccatctccccaggcccaaattcctatatatttataagcttccactgttccagcacaccacgccacttgcttgaggtattcgcagacagatgagaagaactgtgagaagaactgcaaatctatacaggtgtacataaacatttatttaacaaaagagtcagatttgcttcttccctggagcttcatgacagctaagataggtgtcattgtgtgaaagcaagaagaagaaatactcttagttaactgtgcaaccaatctgagctctatggtactgtgaactggactgggcaattatacaaccccaaaacagcaactctcactgatggtgggaggcaaacacaaaaacagaaggttgggctctgtaatatgctcatgagacaggtgtggggtcacggacaatgaagatgggggagaggatttcttcagtttctcatttggtgggtcttgacaagacctgggaaccttcttttaaataatcacttcaagtgcttctggtgataacttctggccccagtcttgagcaatcctcatccttaacaagaggacaccatgaagattgtgccttcttggtctgcagttaaattgagatatggcagattcaaatctgcctgaaatgatgcacaaacatgtgtgcaggcaaaacacacacataaaataaaaataagtgtttttttaaaatgtaggtgattgcaattcacaagaacacaacaccttttattatgtaggataagagttcaaactttattccttctaaatacaaatgatgactctgcaggaaaaaaaaaaggtatagttatatcttatagctttctcttttatacacaaacccaactccatgtggaagtgcaattgaataagacagacctcctgtcatcacattccaccacatccagtctcacgggatcccccaatatacaccctgatcagaaagacaggaagttgagaaaggagtggataggatgacacaccatgtcagcattacggtaaattggctttaacctaattcagaagaccagaagacctcatcggcagctgtgcatggtggtgcaagcttgtatcctagcatacaggagggttgcaagcttgaggccagaggatccctgtctcaccaaacacagcaaaaataaactgataaacaaataaggctggggagtacttgcctatcatatgcaagttcctgaattccatgcccaccaccaaactatgtaaataaataaaggcacactcactctcgctgtccccgtttatccttgtgtcagccatgtaaggaaggtattattctccttcacattttcacaaatatgcaattggaaacatggctcttgggaaacatgtgtccaccccctactggaatccactgtcttgtaaagtacctttgatagctggatgatccaaaactacatttggaattcagaacttctccaaagagtgcacatatttgttttggttggaaagtatttcttaagaaaattaaaacaaaactaccatttgcttgaaattctctttatgaaaaatttgtaggaactatagctataactggatggtggagtacttggctgtcacacacgggactgtgagttcaatcctgagtgcctctaaaaacaacaacaataataatacccagtgcatatgaagagaaaaagatgaatgagctgagtggcaagaactgcttaaaattattcccaaacttgtatcttgttgttgagaccacagatctgactattaaccagctgtccacatatgaagagttaagggaacaggactggtttttgcagggtcactccatactagcaactgcatgcagtgagtcaattaacaaaatacatgaattaactgagagaatgatgattcactttttataagattttctgtgtgtttcctttaagtgagagcccccacaatgtatttaaagcatgactccacttagagaaattctatttcaatttaacccatcaagaaagcgtccaactcaaataaagctaggtagaaaatgagttcaatttagactaaattgcaatgtttttcctctgaagaggtagcaatgccctaggcacaaaagtaaaattacagtctattagtggagagaaaatcaacacattataaatatgtaaacacctagaaatagttagacataaaacacattttgaatactaaccaaccctgctatgactaggaaggtaccagaacctcatccagccccgctttagcagccataaccggctgcagaaaagacccagcaagatgtaggcctctaactcagcacatgtgttgggcttccaacctttccggcttccaacctttccggaccttgccccagtcactaggaaaccagacaccctctatgtgacaaggaaccaatcaaaagttagctgaagggctctggatatgctttaggttaacagtggtacagagcatagcaaccacctggaagggcctctgagcttagcaaccattcctgcaggtgcagttgaccaatcaacacaggacagattgcccaagtccggaagtgcaccaatcctgagaaggttgcagaccccagacactccccttgctctaccccaaaaaatcccctgccctccggtccctccgggtccttctcgctccaccggccatgttgcacagacgaggacccaagttaatacagttaactcgttaattaattaaagactccctcttctggcatctttgaagacccataatcacttgcacagaagtacatagatttatttatttaaaaataaaatacacccttaaagcatgcaatccagggtttctagtatttctatcaccactatttaattccattaaaacatattttagatttatttcacgcgtatgagtgttttgctggtatgtatgtctcagcaccaagttgccatatgggtgctcagaatgggccacaggtcttctgcaagaacaagtgctcttaatcacggagtcatatctccaggcccctgatctcattataaaattacatttatttgtctgggtgtgtgtcagttctctcctcccaccatgagggtcctggaaatcaaactcaggtagtcaggtttggtagcaagtgtctttacccactaagtcatctcgctggtccctaattccactttctcatcacccacgggaagaaatgctgcacccgttaactgtcagtcgtcttccacacttcccttgtcccagtttccagcaccctctgacagattctgtttcagttgagcagttgtaagcggcccagtgtgggtgctgggaaccaaacacaggctctctggaagagcagccagggttctaacccctgactctatagatttgcctatatgagacatctcatctaaaagtgtgccactctgtgtttttatttcactaacacgtttacaacagggcttgtcttgtagttttcaactagcagtactttattccttttttgtaggctgaattattacaatgactcttgggaaaggctgacctaaatacaaatttccatctagacttaggaagacgacacggcttctcttagcaggctttgtcgagttgctctgaggtaaaactgcccggcttcctttctctctgaccaggagtgtcctgctaccctcaggcagcttccaatcggctgggggactacagcggccgcctctcttgaggcgtgaggcgtcttgccctccttcccagcaaactctcgggcgagctctcgcctctcctccctcccgtcacccgtgtcaccccacaggctcctcccgctcctcgccccgccccccggaggaggcagaaggaggaagtgacgcacaggaagtgtcctggtcccctcacagtggaggaaggaatcaagctcccaagatggcggcgtctgaggagcggatggctgaggaaggaggcggcggccacggcgacggcggctcctgctcggccgccggctccgctcagcgacagcccccgccgcccccgtcgcaggccccgccgccggggtcccaggcgcccgcggcgcccgcgctggctccggaccacctgcctcaaaacaacacactggtggcgctgcccatcgtagccatcgagaacatcctcagcttcatgtcctacgacgagattagccagctccgcctggtgaggcccgcgggaccccgcctcctccgtggcctcttccgtggcgtccgggccggggtctggggagggagccccggggccgggcggccgggacgcggagcgcgccgctgccgccccaagtgtccccggtgccgggcggcggcgccgctgcaggggcccctggaggaccgaggacgggcgggcgggagggagggctccgcgccccgggggtctgtctcctcaccccagccggggacccgcccgcccgccggcgacaggtcacggagttgggcttggtgcccgccgcccggctgagcaggggtcggtcccccaggggctggcggcctgcctcgacttaccgcccgggctgccccaccccccgcccaagtcggcaggcgatcccggccaggctcgggttgtgttgcaagaatagtgtattgttcctccagccacccgagcttcctggtcgagggggatggagtgggtttgtttggtccacccccgtcccccccccccgcaaccccacttgcgtgctttcgtggctccaacccgagccggacttggccgccaagtagagccctgggaaatgaccggtccgcctttgcctccctgacacttcctacccagagcggagcagcttgccccttgacaaactattacccacccaccacccacccccttccccatccaggtcttgccatcgttttttaaactagtgcttcaagcccaccccccacccccactcccccactgtcagagtgggttatttatgccctcaacagagcacgttctatcaaagattttaaaaggggaagaaaaaaaaattgcctttggaattttgctacatctcagaggtttgaccgaggatttgatgaattccttggtccaggaagatacctcacttccttccagtgaatttatcttcaagtggtcaggaaatttgaaggaggtggacattttgaagtgattgagagcccgttctgtgcagtctctaaatgtgttcgggattgtttataaaaggacaaagacatctttctgaatgtgctgtgtgtagcattttcttaataatcaatatgccatattttagacctatacgcctcccactcaaaattgaccgtaattgcatttcaaaggaaatcctcttcaaatagcctgtaatcattcattcacacggtgtgcaggtgttgtgggtgggtgcgtgtgtgtgtttcccctggtcagtacagcacttcaaccatgccagtctccagaatggaaaatttcttcagttggaagtaggtttttcagaatatggtgcccttgattttcaaaacatcgtcctagaatttcatgtagaatcataagtatttctttatattttacgaagaatggtggttgaccagaatttcgctttatgtacacggtgtttgacaattgggcataacatttgattgaattgagccagtcagccagacaatggctctgcaaagcttggaatgttcacagttgttttaagtgttgagaaaaactgggttttatttgcatgttagtcattttccttttttttttcattgatttttgtttggtgtatgtgtgtgtgctactgctctttcactgttctggacttcaaactcagtactctatcagttgtaactggtttgtttttctgtttttttggcctagtgtttcagatttataatttaaaacatttttcataaggagtccctttgctcccagccacttttatacctgcacgtttggtttagagaccaggaggtcttgtccctttcttttcctaatgttactggatctttgtgcgacctaagatggatctttggttttagattcattggtctcagaaaatacaattcaagtaacataaaatacagatgttctttcttgtcactaggtgtcagcattaatttaattatgatctttttgtgaaactgatagaaaagagacattgcctggcaggctctttgtatatatcttttcaatttaaatggttatttttacctaaattgtttgccagaaaaacccaagagacttaagtgtatgttctggcatctgctatgtacattacttaagttccttccattgtgttttcttgaataagaagtaaggctggataagctaggaagggagtaatagtaagaatacaggtagcttccataaagcaaaattgtaatccatgggctagtgtatgcattgttaagatagacattttgctttttttcttcctcttcctctaagacatcagtcttcccctgtttctagcacctaacttaaagggcaggtgcataatccaagtactcaatattctgtattttctataaaagatctctgacctggagttgctgcaataatatatttcaattatttttccaggttagttggtgatagtctttgcttcctgtaaccataaataattgaaatttgattttccagtctactgatttctgaaggtctgtctgaatgaatgccttattcagttggctttcttcctgctactaaattttgcttcccaaacatatgcagcctgaaaattctggctccacagaaatagtttaaatatttaattcctatcatgtgttaaaatgtatctggctgaatactgcttttcagatggcaaggtctgtactttgagttagatcctttcccagtgagacagacaaattagtgttgatgtggctttggtgtatcacccagacccttagtaagggcttaagagattggaaacaagtagccaggggtaaggatggagactacccttagggaggagagcagagctagctttcagtgtgttactttgactcatgaggctagtgttctgtgtaggagaggattttcaagatagtagagatactgtcggtggttctcccctgtaattctggtggtgctcgtgtaaatagagtggatctattatatttcagaacgtaaatatgactgcatgttagaccgagaattcttgcttattatctggaatagaaatttccagtcagcaaccaagtatataaagccacactctgccccaagagacttgtctagatcactctagagagtagactctgctgtttatagttcctttcatggtttgtttgtttttacatagagaaagctttagttatagattgggttggtagtaggaacaatgaagagacctttttcttttgtttgaagtaggcctcttctctgccttatttctcactgtatgttagaagttcttgaccttttgtctcaatatacctttatactcttttttaaaggttattgatggtcccaagaccttaccttagaaagttccataaaacagaagaatacaaacacacaaccattagctctgagaataccaaggcatcgcattattactgtactgctctggaatcctcagctggattgagtgagtgaaagagtcacctcttttccattatgagaatagtttggccttggaaaccccaggagtcccaccacctaccttgagaaccaccaccgtttttttacagtgtaccctgtgtggtggattttctttcctcccagttctacagcaggtactgaaggaaaggtaagggataaaaatcttgtaggacagttcctcccttctgctcactcttcctgaggactcacaaaggaagagtcaaccaacagtcctgtcccagtgtccttatggagaggtaacggacacacccttcccagcacacataaaagggtgttgaagtaaagcagggaaaacttcttcaggaccattgttggatcattacctgcagaaaacgtctggaaagcactgaagcacctgggaggattggctgaggggccggcatgagcttgaatctggaggtataaagttttcagtatgctgttaggaagtttccacctatccttggacattattccccagcagagtgaagtataaggaactattttttatattctccaagattgtcggcctttggtgaggagaaatgtccaagaacgttagcagaatagtggctggacaggggactcagttgaaacttgcttagtagtcagaagagtgggagttccgatccccaaaaccacatttgtgccaggtaggcatgacagcccacttctaattctagcctctacggtagagatccccgaaacaagcggctcaagcctcaatgtgttggcaagccctgggtttaagagaccactcttgaaaagaatgaaggaagagagattgttccatattcaccgtacttccgtgtgcacgcgtgcctgcctacacaggtgaacatgcgtgcatgcaaaacatggaaagaaggggaaagcggctttaatcatgccatatgtattcgtatcccctgtgctgtcttgggcagcttctaccaatgccaagctagagaccaagtctccacacatgggcctttggaagacacccatatcccattgacaacacaaggtgtgcagatacatctgataccttctgtgtagtaattcttttcctgttttgtgtacgtgtattcacgtaggtgcacatacccggggagaaataaggtcagcgctggtaatcctccccgagtttattcccccttattcactgtgtatcatttgggccttccagagcctgtgatgcagtgtaaactttcagtgtgttgaacaaaatagttctaaaaacatttcactgttgtgaataaacagtagaaagtcacatcattgtgaagtaaaggggttttctgtagttagtttacactaactactgaaaaaatggtccttatttgcctcaaataaggttttgtttttcaggtttttaattcaccccagcatgaaactaatatcttgcaaaactttaaattttttcctttatgtatgtacatttggggggggtcatgtacgcgtctgtgtgggtggcatacatacgctagtgaattcacatatgtgcgtgtgaatgtgaaagccagaggttgactggtctggtttagctcaggttggcttcaaactagcaaactctgggtcctcctgccagcacctcctaaatgctacaattacaagcatacactactattcttagcttaaggaaaaacatgttttaagatttgttttgcttttatttatatgtgtgtgtctgtgtcggccacatgtgtgtagttgctgtaggggccagaggtgttggattccctatagctagagttacaagtaactatgagccacccttatgacagtgctgggaaccaaacaggtcttctggaagaacaacaaacacttttaactgctgagtcatcatctctctacccaccccccacccccaagaaaaaaagttctgagactaaattagcatagtataaacaagatggccatttttaatggtgcatcaaagtacccacattttaatcaatgctcacttcctttactaaggagaacagcccagataacagaaaactcttcaaaaagtcttccttctggctttataggaatcctcggaacagactcttcctaattgtttctctcagactaatgtaaaatgaatttatattttctttcaagtgaatatctaggggacaaaccacccaagataaaatatttcttataattctacctgctgatgattgagaattatgatgtatatgtggtgtatataatatgccatagtactaggttacaagcactggctgctcttccagagtacttaggtttgattcccagcactcatagctctggcatctcccaaccatccatgacccagttgcagggatccaatgccctcttctggcctccaagggcacatggtgcgcaaaagatgtgtgtgcaagcaaatcacccatgcttatgtatacatatactgtgtgctagcacgagcactgtaaggcagcctgttttgtaaggtggacatcattttttaggaaacataaaatactgttatgtgagacttggtaagttgatccttctttggacaagagaaatgaaagtgaattccctgaaaaagaaaataggaaagaaaacaggcagaatggatgtcctcattaactatgattttataaatgtcatttcatccatcattaattctgggcacctttaccttgactccttcacttgtctgctcagtctcttgctctaaatggggtggggcagttgggtgcacgggcaaagatgtagctcaccttttactaacccgtttgaagagcacaaatataagacgtacctctcagtacttgctttgtgtaaccacagtgtcatctgtttccgggatttagcattcgagcttatcttcagctttctcagttttcctcagatgtcttctatagctctttggggggaggagcatcttggatctgataaagaattaagctctagaatactccacacttccattcttttctgctatcgatcttttgaagagttcaggggcatataactagtgaagtcacctgtagtagcatgtaattgtgatctcagcacttgaaaacctgagacaggaggattgcttcaagttcaaattcagcctgggctatactcaggaccctgtccccagtcaaaacaagtgaaaaatgaagttctgctctgtagtctcgtatcagtagtttgaactcaggcattgaatctctaatgatagcttttgaattatttagagaaaaacaccaagcgtttcacttaaaaaatgaaacaaaactctagagcagccgggcgttggtagcgtacacctttaatcccagcactcggaaggcagaggcaggcagttctctgtgagttcgaggctagcctggtcaccagagtgagtgccaggataggctccaaagcaacacagagaaaccctgtcttgaaaaacaaaacaaacaaacaaacaaaacaactaaagcaccagagaatatgttgtaaaaactgagctgtattacacaatgtcctccattccaagttagtgtttcatagcttggtatttatgaaatcagagtgtaccttgagctgctgtatatgttactgtggtgatttatatgagtgatatctgaaagtctttatagcatcttaagcaaaactgaagacttccagggtagtatttttttttcaagacagctcaggcatcagaggaggaaatgctgcaaattaaaaggcatcatgtattataagctgctcagccaagtgtctaccttagaattaaataaaacttgacttcagagatattaaaggaaaattgcaagtttcacagattttatcatgcagttgctttgcattgttgagaaagaccatggttgacaacaaatctaaaaaacaaaattttaaacaaatatgtgaggggggtgctggagagatggctcagcggttaggtacactgactgctcttccagaggacccaggttcaattcccaacacccacatgacagctgacaattgtctataactccaggatccaacaccctcacactcacacagacatacatacaagcaaaacaccaattttaaaaaaaactcaaaaaatcttaaaaacaaaaaacaaatatatatgaagaaaaattttattaacacttaagtttaaaaaatgatttttaaaaagaataaacatgacattttaaatcctgaagtaattaatgagttaggaaaacttaattctgtttcctaatattaaaacagcagtgtcattgctgtacaatggtggagtttattagttccctttgtttggggttttttggtgggagtatatttttccaataattatgtagcatttatttttttttcttcccaataaaactagaaaaactgggcctggcgggcacttgctgctcttccaggaaaccaggattccattcccgcattcccgtggcagctcacagccacctgtaactccaggtccaggggatcttctggcctctctgtaggcatcatgtctgcacatactactcaaacatatatgcatgcaaaaacctatacatataaaataactttcaaaactattaacagatacatggatccattgtgtatattgatgtttataactgacatgtttaaattgtctatgacttttaaaaactgtaagtgctgccaaaagctgtttcctacatcatttggtcccccccccaggctttattttttttaagttgatgcataagtgttgtgcatatttggaaaactggtagttaattagtttgtttttgttgagacagtcttactgtgcagtccgtgctggcctgtacttgatatgtagcccaggctggccatgaactctagctcttccttccaagtgctaagattacaggcatgtaccaccaatgcttggagtaggtttggacacgcatatctgttgtgtaatgtccaaattagcataaacaagaatctcaaacctttatagtttgttttatagtgaaaacatttaaaatcttttcctggcatatgtaagtgtactgtatttgatctctgtagttaccttgcacttggtaactacaacctttaaatggagcttagtgactgttggttagccttttcccacccgactcgacccttctcagcctttcctttctaacattcttgcttgttcctgtgaaccccaatggtttctgacataggcatcatctttgtttattatgctgtgtgttttaatttgtatattaggtaaactgccaattggctaggatttttgttgatattaacaaccaaagaaaatttttcccttgagccatagaaaattattaacatgcccctaaatttagaactgcactttagatgaggcagtttgggaattgtttctgctgtgcagggtggtgtttctgcagttaggtgtggtgtggtgctgtacccagcacctctgcactctgcctaagtggggtgattgagagttgcaggctagcatatactggcagcagtggtcattaagttgctttccatagggaaggacatttagtacagtccagatttcctaagatgactgcctccttttgaatcctaaacagatgtgtgtgtgtgtgtgtgtggtcatgtatcttcatgcctgtgctgttggtgcttattgagcattcatgaaagaagaaggaccaataaacactgcgtgtcagacgctgttgactaatgattcacagtgtgtgtttgatgttggcttctgtggtgctgctctaatttgtctttgtgacgtggtttttgtttttttctgtttttgtcctttctgttagcttccatctatggatgtcagtgcaggcttcatttataagcattttttttcttttatcttctcctttttcctctgggcttcatccatattgatttcagctgtctccagtgagttttcagaagaaaatttttttaactctgaatattacagtgcttacagaaaaaaacagccaactgccccagcatcaactctttgaaaagattggggattgtcttttaagagtggtttctcattatctgatttacaggcttaagacttgggaaattttctctcaccttccctgtacatctaatctgtcttcagaaatacttgcttggtactttgcttattgcagactttgtccatttgcagaaccattgcctgtaatgctgcagtcttgctctttcttccttagaagcctaattcagatcttcagtcatgtgctttccgcttggttgacttttgggttctcattagtgtgtcttacctactcaaattagtaaagcaatcatattattgaatttctgcatggttaaagaaagacaatagaacccttagaaccagatagatccagtggaacaaaactcataacaagtaatttcaacagtactttacagttgtcacaggaataatcgattggccttagggggtttgtaaatatgtggttgttcaaaaaattatttaatctcagaacttagtaatgtttcaaagatacaagaaatatcctataacagtagaaggtcttaactttctgccttgaaagatgagaatttagccttctctgtttccatttcacacataaatatactatctttttcttcctcacattttccacaaaaaaaaaaaaaaaaaaattcagtgctcatgtttgtggtgatgtgtttattccatattaggatactgaatttctaaagtgtgttccagagagcctacagtggttcccaaaatgggctctgtaagattgcaggtaactcattcttatgttttgtttcatttttaaatgtttatgggtgtttgtcctcatgtgtatctgggcacctggtacttggggaggccagaagaggacatcagatcccctggaactgagttacagaaggttgtgagcttccatatgagtgctggaagagcagtgaagccccgcagatacttctgttcagtactaagatactatatttctcactcgttcttttaaagtataccatagtgttttctagtagttacgtggcctgtgaccttgtctatatgttagtaacaattaaaatatctgcttgtatgttcttgtggaaataatttttagaattttctcatatcaaagaactttgacaaatgtaaaatagtgcttctcactaagcatggttttaaaaggaaattatttttcatttaaaacatgttataaagccaagtgaggtggcacttgcctttaatactggcacttgagagttagaaagatctctgagtttaagattagcctgatctacgtaatgagttccaaggccgctggagccacacagtcagtctatgtctaaaacacacacacacctctgtctaaaacgcatgtgcacaggcatgcatgtatgttcagaatcaagtgtgatgcacatgcctataatcccagtacttgagaggttgaggcaggaagaccaggaggtcaaggctatcctctgatacataataaattcaagaacagcctggttatatgtgaccttgttcgtctttctcagtatgtgggtaggacattgaaccctctcgataccccttttaaatttactgtaaagtagaaatgattcattgtgccctcttcatagggttcttttacatttcactggaaactaaatcccaattactctttgcctttgaatgaacagagccctcggtgggtttaaaaagcagtgatttggaattttttgagacgttcttgctatatagccctggctggcctggaactcctcaaacttgaaatagccttctcacttcttgtttcttcagtgctgggattactggggtgtgtcactaccctcaatttgtttttttactttattatatagttgaaaataacttttccctaatgtgtttcatatggcctgctgtgattcaatattaaaacatgaaaatcttcatgaaattcagctcagtgtacaggaatttttgtcttcctgtgctcccaggaaaaataaacttagagatttcatcttaacaaacacatagcaagtatttgtttatagatactgaatggaataggacatataaaaagaagcatggcatagcctctgctaattggcatggccttggaaggcactagcttcaatagcttgtagcatctagcctgtacagtgagaagtaacctttaggttgatgaccaaaccattataaaattttcgggacggtgggggggacacgacaaaaccacttaagttttatgtgctggatttaaagtattaaaagataataaagatgctaagattgctcagaaattagatctgtagaacagaggctttgggtatgcagtggtttagagtagtccaaaggaattagcttgtgtgatttaatctcattttgtgattgtctcagctgtctcttgcatcggtcttgccagtgaacctgtaacggtggccacacccctttgggcaaggcttcaggtggactgaagcagaatgagctacctactatccacacctacagatctggcacactgtttctgtgttcagcacccaaaagtggttgcctttccaatgtccgttgagaggctttggaggatataacagcatctcatctgaaagccttggacatcatgacccaatcaccaagaaatacaagttctcattctgctagtatttctgagattagactaaaatttgaatttacccttttgtggggggagtaaaagggaatgtttcaaactattaaaagcttccagttacatcattttactgtactgcagacaggatattcttcacatctaagtaacatctttgcccaaacaatttcttagtgagacaccataataattccttgggactgatgacactggtagataccgctttaggaacggtaatgcacagagaccttcccacctcagtcatcccatccaggtttatcattaatgaatttggtcattggttttattttttttaattctgtctcccctctgcttataggtatgtaaaagaatggacttggtctgtcagagaatgttgaatcagggatttctgaaagtggagaggtaccacaatctatgtcagaagcaagttaaagcacaactgccaaggtatgttccagctagcggcgggggaataatctggccaggcactggtggcacacacctttaatcccagcacgtgggagccagaggtaggtggatctctgagttcaaggccaacctggtgtccagagaaagttccaagatagccagagctacacagagaaacactgtctagaaaaaacaaggggaaaacaaagaaggccggagagatgactcaacagttaagaacatttgagaggcagaggcagaggcaggcagaattctatgagtttgagaccagcctggtctacagagttccatgacagccaggtctctgtagagagaccatgtctcagtcaatcaatcaatcaagcattgagtcaggtgtgatcgtgcacatctataatcctagcacttaatgatggaggccggaggatcaggagttcgaggtcagcctgggctacatgaaaccctagctttgaaggagtctcaaaaaaccaaaatgaaaaaaagagagaagctgggataccagcatgggactgatccagaccccaggaacatgggtttcagtgaggggacctcctgtagtagttcagtagcataggggtggactttgggagcccattccacatagaggaatactccctgagccaagacacatgggggtgggcctaggccctatcccaaaggatacaatagactctaatgaccccctatggaaggcctcaccatccaggggggagcagaaaggatatgtgataggtagggttttagttggggggggtacgggaggatgggtaggagaagggaactgggattgtcatgtaaaacaatgctgtttctaattcaaataaaaaaaaaatggaaaaaaagtgaacaagacaaataaaagggctcgtgtgtttgtggcatggaagattgtatattgttaatgtgacagtgtttctcaggacatacatacatacatacatacatacatacatacatacatacatacatacatacatacacatacatacacacacatactcactcctgaccaaagctcagctctatacatacatagtttttagaatttggacagctaatcttaaaattcttgtggaaatataagagacccagaaaaactaacacagttttaagtaacagtgttgaaagactaatacttcttgatttcaaaacttagtactaagctgcagtaatcaaaatagtatggtacaaatataatgatagacacatagatcaatgaaatagaatagagagtgtggaaaataaacccttgtgtagttatttgattttcagtaaggatgccaagaaagttcagttggataaagaatggtatttttttaaaaaaaaattggtcagataaggtgatacacgcctttaatctcagcacttgggaggcagaggcaggaggatctgtgagttcaaggccagtctggtctacttagcaatctctgagacagcaggactacatagagagaccagtagaggtcagcaagattgctcacaggtaagggcactgacaaatccttttgtaaaacacaaaatgaaccacattaaaagttaaacagccaggcattagtggtgcacgcctttaatactagcacttgggaggcagaggcaggcggatctctgtgagttcgagccagcctagtctacagagcgagttccaggacaggctccaaagcaatacagagaaaccctgtcttgggggtgggggaagttaaacagatatacttcaataaagcagtttgccccaagtgtgtattcaagagaattaaaatgtgtgcccatacaaaaacttgaacactatagctcagtggagcacttggctagaatgtacaaggtcctggcgtggtgtcttaattagggtttctgttgctgtgaagagacaccatgatcacagcaactcatttcagtggggtggcttacagtttcagaagttcacttcattatcatcatggcaagagcaagacattgtggcatgccagcagacatggtgctggagacgtagctgagagtcccatattttgcaggtaacaggaagtggtctgtctcactgggagtagcttcttccaacaaggctacacctctctttgggggccattttctttcaaaccatatctagctggtaggtgatggcgcatgcctttaatctcagcactcgggaggcagaggcaggcagatctctgtgagtttgaggccagcctggtctacagagcgagtgccagaataggctccaaagctacacagagaaaccctgtctcaactcctcaaatcaccccgcccaaaaaaaaaaacccaaacactacatctgggtccaaacacaacaaaaacacatacttgtacagatattcttagcatctttattcataatcaaaataaacaacccaggtgtgtaaagggatggtatctgtgcataagaggatgttattccaaaataaatggccagtgttagagcatcagtgaactgtgtaaactatagaaatgtgaaaagccagacacaaaggctacctcacgatcccatttattctggtgttcagaaaaaggaaatcatagaacagaaggtagatgacttgtgagatggctgcagctgatgaggagtacatgttttcattctgaggtgatgaaggtgtgccgaatttagataatggtaatgcccgtaccactctgtaatacacagaatctactctaattaaactacataccaaatagagtgtggcataggaacaactatcgtctaaataaagaaatactttatgtagttttacatatgagttactggtgagtaaaactgttacaggagattgaaggagaaagagagaaggatgttggtatcagactcagggcctcacgggtaccgggcaggtggtctaccactgtgctgcactgccagctattactgtgtctgcaaacagtgatttttaaaacagatgttttgttagcagtagttcttgttaaagatctatgagcattacagttatgacccagttgcaaatgcctaaattattatgttaaagttcatctgtttgattaggatacttggattggttaacattttattctcctctactgctttaacagtcaccactgacttattgttatttcaggagagagtcagaaaggagaaaccattctttagctcgtcatgcagacatccttgctgccgtggaaacgaggctgtcactgctaaatatgaccttcatgaagtatgtggattccaacctctgttgcttcatcccaggaaaggtaaccagtgccacatacccagaaagctgggctgccctgtgtaaactaagtcttcaaatgttacagtttttatgatgtcagaaatattacttctctgaatgtgtttttattagtggctatatttagcttttctgtacaattataaatatgcatcatttatgtgatattgacatttaaaagtctaaattgtaaaatgcacagcagaaaacagagacttggtgggggctcgtagttaagaaaacatttgacctttatggtcagaataccagaaatgctgcattgaacaagaaaaggattgtgctgctttcaagattgttactgcttgggatttggtaggatggagggttgctgggtttggtttggattttcagatttaagcagagtagtgtttgttgggtgggaatgtccagggttaaggagtagacctcattaccacacttgagatggcacttgtactgttgctaagtaaatcccccttcccaaccacactgcatgacctgaaacttcaggagcgtcctacttgttgaattgggtgtagattcaagtgagatacagaagcaatggaaatggatttaaagatcattttgcttcttgatagtgtcctttcagtggtggaaatttcttgtttccatgaacaatttatagtggcaatattgtgtgtagatactgttgccattctcagtttgcagtgacatctgatttgatggcatatagtttatttcagatcttctttgttgtatcttatttccttatatgacctacaaatgcttttataagatactgtaagagcatggctagctaaaaactgggttcacttttttatagtagatttcatgtattgtagcccttagcactgtgtgctgctgagaagttcttggagcctgtatgacctgtcctctccaataaacaattgcactgtgcatctcatttttagtaataggagcagcacagacatagcatccagttccctcctatcagagaaagtgcagcctattgttctaacagggctttgtggctggattgggggcctgcaaggatgagcatttttatctggcctttacagaagttgttgccagtcttcgtttgggtttacataactgaaacattgatttgtactgcctgagcaactgcagtgaagtccagtctagtgctattctttttggaaaccacttatgtgtcggcttttatagatgtagatttaaattctagcaccaaatcaatgggcagcaatggacacatcttcaggtttccagatctaaccattgtagaccatttgtctctttaatatgtgctctttcttgaatcatttgaaaatctgttacagacattagtaagccttgattcttagatatgttctgtgtttcctaagtacttgggcagtcttccttgcataaccactgtacagatagaaaaccaggaaatttagcattagtaaattacttcctacctgtccttgacagtttctgtttagatttcattacatgccacaatagtactttcctagtggtgttctctctctctctctctctctctctctctctctctctctctctctctctctctatctccccctccctctctccctccctccctccctctctctctctctctctctctctctctctctctctctctctctctctctctctctctccctccctccctccctccctcctggaacttgttatgtagaataggtcagccttgaacagagatccacctccctctgcctctggagcactgggattaaagccatgtaccaccttatattttttgtttgtttatcggggtagggtcttactctgtagtcctggctggcctcgaactcacagagatctgcctgtctctacctctgaaatgctggtattaaaggggtggaccaccattccaggcaatctctagtttcttcattatcataggccagttatggtgaggataacaattcaggtttatctaatatttctaaaatattgtgactttttaattagatttcctacaaaatgtccttaaacataagattacttgggttttttttttttttttttttttactgtgactaagtgaaattaaagctgtaagcctttaaatgaagtaatggtcttttaaaaataacaaaggtgtatatggggtgagtgcctgcagaacccagaagggtgttgggtccttcagagatgtaattacaggggcttgtgcaggtctgtccttcagcagtgttcttggatgactgggaagttctgattggctttttatatgctgtagtcttaatattagcaaataacaaagactcgcttgactaaaaggtagcagagtgaaacaggatgaaaagcacatgtaagggttaaaaatgtaaactgctattctatgtgaagtagaaagggtattcagacaaacacgtgcatataagggttttcagggcccttggattgtggaaggctttttttaagtattgaagagtgggaagggtgaagttgatgtgaagaaatcctggtagaagaaaaacacgggtggataacatgaaaatggaagcggtagaagccaaccagtagattgtaaaagataaactcagcccacaagagcctgaaggtgcaggtggtcagtatctttgctttacagtgcggatgtgtgcctctcgaagtgaagttttgtttagaaatgtgatagtgactcacactgggaatatgccaaacattttaagcacagaaatattcctgaaaatttagttcattgcttaaggcctagttagggttaggtatgcggcgtatcacttaaaaggcatacagacagccattgggtaacctatagggagacaccctagcgccgccccaggtaacccggacaggtgtgccgggacacacccgtgagggcggggtgaggggaagtctgagatgacgtagaaggaggttcaaaaagagcggggctcacgtggaaagcccttctctctggccacgctagcttgctacctgtgggctcgctctggctttgctctggcttgcggtttggactggtgtttacctgaataaagaagtcttagccttacggactacagttcatctttgagcgcacgcggcaactgcaatcaacagtaatccttgaggtccactgtctttctgctccctctcaagacgtgtttgtcttgttgtattttttgttttgttgtggttgcttgtttgttttgagataggatctccaggttgacttccagtcatgcttgccttgctccagcctatgagtgctggggtcacaagtgtgctccaccagattaaacaattatgagagatggtcagatgaattctgagacagggtttctttgtgtggccctggctgtcctagaactcactctgtagcccaggctggcctcaaaatcacagggatccacctgcctctgcctcccaagtgctgggattaaaggtatgcaccaccaacgcccggctccttttccttatttttccttgttttgttgcacgtattcattatttgtgctttttgaaataggatctcactatgtagcctaggctggccctggacttgtgatcttcctgccttaacctcctgagcactgaggttgcaggcttggccaccacttctgactgttgtttttcttgaaccctctgtctcctctgctttccctccttgctcagagtttaccgattgctatttccatgccctcattagcctgcccagttctcaagtgagtctccctttgccatctgtgccttacacagcactgtatttgtacatggaactcacggtagtatgtctgatgctattcatgagtcattcacaaagttactgttggctgggatctgtcttttcacagctgaataaataaacattgccaaacgtgctgcaaatgttagcctaccaataaatatgtgtatatacataatatctggagatttagtcataaaactgagaacacctaattaaacagaagcacatataagaattgtgttttgagaaaatattctcagtattgaagttaaccctgtcacttgcccctatacactttcatttggatatgtcaatattaatacaaatatttggctgttgttattccttatttagttaatacctagaagtagctggcacgtgccaggcactgtggggctttgggtatccgatagtgaaaccgaccgtgatctcttctgaggatgtctcagactcgcagagacctgcctgcctctgcctcctgagtgctgagagtaaaggtgtgcaccccctgcctggccccgaataagaatcttattatccctgtttactagtttttactctgatactttgaaacatcacaagcattaggaagcactctgaaaataacttgaatgatgttttttatttattttatgtacattagtgtgagggtgtcaggtcccctggaattgtagttacagacagttgtgagctgccatgtgggttttgggaattgaacccaggtcctcttgaagaacagccagtgctcttgaccctggagccatctctccagctcccttgaatgtttattttaaatgatgtttgcatagttatgtccaagaaaaggtactccattttactatagtctggctttctagcatggtagttgaataagttattgaaaaggttcgttttcttctggcatgtatggaatagtaacagcacaaaaatgtaacactagccattggttctttgactgtgcctttggctctctggccctcatgttctctctttgggctcagacccttggtgctgtctgatgaaacacccttggtgttccctgatgaaacctgcccgctgcagtttgcctcctgtgctcctgaccttggcccagctgcctctgacacacatcccctgattgcccattgaattcaacacagtatgtctcagtccattcagtctgcctgatgctctgtctcagctcattctgttcctcgtcagtccttgcccacaaagctggtcactttggtgaagccatcttgtgatcatacaaaggaccattcctgacagtttaattttgctgacacttactgggcaagtcattctatactgaccagggatcatcaccttcatcttgaatctagaaaacattaagggctatggtttgtccaggttttgttagactagataatgtgtttcttgtatgtttgttctctgagccaaaaagagaaggcagattacaagactgacccagagttggaatgaatgcagcaagaagaaaatgtgaatcagggaggtttgagactctgttggcataatggtttggcttatagcccctagctcttgtgagataaagtcccattgcaatagacattatttgcactgtggtcttcaaagattactgttttcaggtctatgttgaagccatggatgaagccagggagaacaataccctggcagtgagtaaccctgagaacacactcggctaagggcattcagctactgttcaagtaggagagcagggagttagaaaccagtgcagcgagcccttgcttcttctccattggtgttttgccttcagattccccattgcagttgtcattaaaatagaaaaggacattttgctgccatttggtgctagtgagaaagtgtggtctgaatgcttattcctagaaaaagctttaagggatagagcatgtggtggccgcgcacaaagagaggcatcagatggggttctcgggcttggggacagcatcagggttgagtatagacttgggtgaccctgccactactccatgcagagtttcttcagcagtcatgtggttcttcttgtgtgtgtttgtgtatctccctggttgctccgatttccttcagggcaggagctatatcttattgttctgactctgcagctttagcacagtaccctggtccaggaaggatgcttactgggtctaagcatccagaggcctgtgctgtcgattcacctgctcatgagttaagagctctgtaagttttcacagcagctgtaagatgggtcatcccttcttcactattcagctgatctcttttaaaactttataaagtgcttacaaaaattcattattgcaggtgattgatgagatttaccgtgtactgagatatgtcaactctaccagagcccctcagcgagcccatgaagtattacaggaattgcgggacatctcctccatggcaatggagtacttcgatgagaagattgttccaatcctaaagaggaaattgccaggatcagatgtgtctggaagactcatgggctctcctccaggtatcctttttggttttttttcttttgctgacaaggcttcactgtgtatctattgctcaagctggcgtcagactctggatagcctatgttagcctgagacttagggtgatcgccatgccttggcctctcagtgctgggagctggctatgcaccacgagcacggcagccccccttgggcgtgtcttcagtttctaataacctcgggaaaacatgataacctgttgtctgtgttttcaattacccacacgtagttggttttgtgctgaggatggagcccagagctttacacatattctgctgcaaggttacttccccagctccctgcttctggtttggaggggttttgttttggtttgtttttttcttaaattatgctctctagatccatttcatggctaattctttgcatgtgaccataccactaatttaaaattagttttgtattgtaataaacccaaaatcctaaaataagctgaagtgttcctagtagaaaacatgaatgattaaccctttaaatactttctccacagttcctggaccatctgcagccctgacaacaatgcagctcttctccaagcaaaacccttcaagacaagaggttaccaaactccagcagcaggttaaaaccaacggtgctggcgtgactgtcctcaggcgtgaaatttctgagctccgcaccaaagtgcaagaacagcagaaacagcttcaagaccaagaccagaaactgctagagcagacccagatcataggtgaacagaatgcacggttggcagagctggaacgcaagctccgagaagtcatggaaagtgcagtaggaacatcctcagggtctgggcagagtgaggagtctcctcggaagcgaaggaaggcaacagaagccatagactctcttaggaaatccaaacgacttcggaatagaaagtaaattggaatgtagttgtagctccagaggatgacacccatgactgggagtttaagcagttattcctgtcagaaggctggagcaacatggcgtcccttaggcttccaggcgatcagaacacagcttacacttggctcttgtggttggcatccttttcgcgcttctctggtggagccgatgcacagaacctccttactttgcaatagatctgtactaaccagacccatgctatcatgtttgggagctaacgtttttcctgtgcagatgatgtgttaagtttgtttgtttcagcatatatgcacattacatacggattttaaacaaacccattcttgacagactaaaaattaagtttaatacataaaatgtcctgttcacttgaaagaaaaaaaaatctactttttaaatggacactatcatgtctaaaaaaaaaaaaaaaaaaaaaaaaaaagttgactttttgtttgttataagtggcctttgtctggaatgtctgagaagtagttaatgctttggtattgaagcgatgggtaacggaaaggactgcatagtgttgactgtagcaggggctctacagtactatctatttttgtaaactactggcaaaggatgtttccagttgctagatacatgctttcagttttctctggggccatgtcctacatttgcatggatggatgcatgcattgcctagtcagcacacttcacagctcttgcactggtgttgatcttgaacctctacaccactggtagagctgcgcctttattggtttaagcgcttaacatcttcccctgcagcagcttacttgtagggggagaatcgtcagtcaatttgtcctccggttttgcagacacaagagactgtaaagtccattgatgtgtctcttctctgtagggttaggtacactgactaagacagaacccatatccaagcctctttctgtagacgtcagacctctgggaactagtcatgattctaacttgtcactgtgtttatgggtcagtcatgactgaatagggacccagctgacggaaaaagttcattgaagaaaattgtgccgtgagaaagcagtttcatcattttctggggcacgagccaggtgaagcttttgaataccactttgaagctcccatgatcccatgaacagaagctttagttttgtttgcactcctgttttgagcttgtaactggaaatgtgtgtcttgcactgtccaacctgagtggtcactataacaacctccaaattgtgtaaagtgcttcttttccctgttgtatatttttgaccattcaataatcactgtcctatttttattataatgtactaaattatttaattttgttcttttaaacatctgttgctttgggcttcagttatttatagtaaatttaggtatgagatagtaaaaactatccctttccaggtgaaagttgacacctgtgtaaaactaaggttttggtaaatcccacagtgggattgttgtcatccgtccaacatgatacgttatgcatccgttaggttacgtttaccaagtgacactctcctacccattcctagtatcgtcccgtcatgaccctgtccctggttttgttcaagttgtccatttacaaatgtagtgtgttttcagtgagaagccctaacatgacatccaaatgtttcatggtttgttgggaaggtaattttaaaataaacagtttcctaaaaagattgtcagccaaggtcatccataaaggtccttttctagaacttgttttttcagcaggtctcacttttgcagccctaggacgtagccatatcactctagccttggaggaggcctgtcaggcactccgagcttgactttatcagtctactgttctggtagaggaagactttttttaagcatcaaagtacaggttttcaaagtataatccttatgcatcaaagaaataagcctcaaattatttcttcaataatttaacaatttctcagaaatttttttcaaactccatctaactagcctaaatgtaatcgctagtcttccattagttagtgtgcgtgcatggctttcgtaatgaacactcacggtaggaagggacatgtctgcttgcacgcacctgtggtctccagcccatcagattgagttgcacttgttccataagtatctgtaactaagaataaagtactacagctcgcttgtcttaagctttacttggagtagctaacacatgttaggaagttgtcttgaccatttaatacagttctttgggatagcatagtagcatttagagttttccaaatcatacattattttaatagataaaactgacttgccatgggaaacttaagcagcctcctgagagagacctcttgcatttcctggcaggagcttacataatgtaggtgggttacagcacctttcatgaagtgtcccaccaagaagcgactcctctgtttgaatgggtcatccccatgtatgagtttacccgtgatacacactacacacaggcatacaaacatgacaagacacgcatgggaggtgaaaaggactggcccctgtcctgcagagccctgctcacctcctacatagactgctcagctggtttccaaccgacatgggttacaggaactcctcaagcttcccttctgatgtggagagcctagaggtaatggggcaattagcagtagccctactgttgtaaagacgattggggtgccccaggtcgaaagccaataatttggaatcaacttattttgtaaaacatgtttttttggagtactgaacttcacaggggcttgccttaatttagtagtttgaagatgtatgcgctaatattctatgtgttgaaatgttaaaatattctatgtagccccaagagtgggtaaaacaagagtttaatgcctaaataaataagctaaaaggtgtcactacagctggattttttagagaaaatgaacacataaaaaataggctatgcgtcatgaacaaaaatgatggcaccttgggattgcactatttcatgcactgttttataggccatttcatagcctgcactttagcctccaaagaaatgctgtgtggtgcccgttcctcttagtgcgctcattcctaagacagtgctcactctgtttcactatgctgagttagtttccttagctgccttccttgagttctctgcatcctttgccataatacttcctaggatccgagaactcctgtctcatcagtttccaaccgcatagcattttagtttaatgtaaacctcatccttgtgatgagagtcatagatcctcttctagtggtgagtacctgtttgctacctaaaccaaaccctcaggaagtagacactgtgggatttgaacacgggaatgaaagacccaaaagggaacacatgaaatgccacagctgcttagaaatgactggttcttacagggaaattactgcccaatgctttgtcttgagatctgcatgagttcctttagggggcaaggggttcagttaacactacttaaatgtaaagcccgccatctgcaggaagttattttcaacaaactcctaagtctacaaaaccgacagtaaccaccgctggtagagtgtggccactgactgctgtcactttgagtaagctgtatgtcacacagataagaactggggcaggcttgagtgatgttgaccattcccagtttcctaagaatcatggttatatctctgaagcccaagcattaaattcacattttccctttgtgtctgaagataaccacacgctttagcataggaatccaatcaggctattgccaaagtctagtggttcatgctgccaaaaggtcaggcgcgttgaagattcctttgtgtggtatcaaatgtctgtttacttatgctcatgagcagcaataaaccactagtttaccttctggaattttcattgttatgacctaatcagttactggaaggtgaaaaaagcacctcccagctacacaacaggacacagaaataaatgtgttgtcaccaggtctacttgtttgtttatttcatacaccagattggagctaccacagacagataccatctccatagctactgttctgagccactgccctgtgtttacacatcactgtgctcagagccaccgtgaaaagcaggtttgactctaaatggggtagttgaatgctggtaagcaacatgtccacagcgacaagataagaaagagacttcagtggggtttgatgacctgcccgaagctttgctccctgctgtgccatactcgattctaaaaagtccaggagcagtgaaacaccatgtggaatgattctaggtaccctctcaagcaagccatgggcggtcattctaggtaccctctcacgcaagccatgcaaaaccaccagtggtagaattgactgagaaaaggccataagtttctggggatgaatgacattaggacacttgcttatttgcatgtacctgcaaggcactgggtttcatccccagcactggggaaagggctgggcttgaaggcagcttggagtgttttgacagtagtttccccaaggtgacttgctgactctaggtccaaggccactaacaaccctataatcactatctatatgcggctggatctgtcagcagtgagcatcagttcttaatctctgccagcgagcaacagcagctctctttccaaaatgcttcctgctcccaacacagataagaagaattcttggtgagctaaaatacagatcatttttagtataaatggtagagagagttcatgtcaatgtttccctacatataataagcttggatgtcttcaaccctgtattaatcttacccacccttaccacccctccacgtgtttaacacactccctccccttttaattccctgtcctttgttttcctggattccacatagaagacatggttgtgacgttggcttatttcacttaacatgatctccagctctgtgcattgtcctgcaaagaaaataattgcatttattgtcgagtaaagctcctttgtgtgtgtgcacattattcatccatggatggacaccaggcccgttcctttcatcagctgttgccaaagtgagatagatgtggatgactctgtaatgacccgactcgggtatatgcctgagagtggtactgataaatttatgacagttctatttccaattttttaaaagttttgagtttttctttatgtgtatgcttatttttgcctacatgactgtgcaccatgcagtacccagggagaacagaagagggcatcggttcccctgaaatgagttacaaagttgttggcctcctgagaattcaaccccaatcttctggaacagcagccagcgctcttaatcactgagccatctctctagaccctccctgctggttcccacagggaggttgactaattacctccccaccaacagtgaggaagagttccttttcccccacattcttgccaacgcttgttactgtctcttttctggtgggtgagatagaatctcaatgtagcttttgttttattttggtcagttgtttattttgaagggctaactctgtagcccacattaccttgaaattcactaggtagcccaggttaaccttggactcacaacaatcctgaatcagccttctggaattatggcatgagtttgaaactagtctggaactcacagcaagctcttgtctcaaaataccaaaacaggcaggtgtagagcccaggcaggaatagcacgcagagagtttgttttctagtttccataacagataccaaaaacaaagcgtacactacgctagctagctcccccatgttaatctctgaaagcactcctgcagggtctgtcctagatgagcgtctccttgcaaagtgcatctcagtgagctgggttcagtgcatcagctcaaagcaaagtgagaggaaagtttaaggggacaaaactgacattgtggacgtgagagctagaagtccaaattacatcaggaaggaaacagatcaaggaagagcttcaggcaagccaggcctggtgacacaggtctgtgagcccagcatctctggaggctgataaaaagaggattgatcatatgtccaaagcctgtcacagccacagactgacttccaggccagcctgggctagctagcaaaaccatctctaagtaagagtgctggagacacagctcagtgacatcacatgtgcacaaggccccagttcaatccccagcatgtcaaaaaaaaaaaaaaaatgcactttcggaaatgccattcatataaacaaacatagctgtgtagatctcaacttttttttttccgagacaagctctcatatatcctatcctggcctcaaactcaacacttagccaagggtgacagtcaccctttggtgtggcagtcagaggacagctctgtagtgtcaggtctcccccttaaatgggttccagggatttcactcaggtcatcaggtgtaagcagccagtgccttgacagctgagccgtctcgttggccttcagccgtccttctgttgtttgtttgtttgtttggtatgtgtgtgcataaactcttggccaggccagctcacagtggaggccattgcatgtatggaggtcagaggacaagtttatggagaagctctctctgcccttacttggattctagggatttaactcgggttttcaactttgtacagtaagcacctttacccactgagccatctcgttggcccgtcttctgtgtttttagctccctctctgcttgccaggttctgacttgatgagtctgtcaagtagcaatgtaaatggtaaattggccctggaaacaggaaacctagggtgtcccttctgtgttctgagagaatagcagtggcctgctctgtcagatcaatgaagggcaagctgggttagctcttcctctgctgggtcggagcaagagcaaaagcacctgctccttaaagggctggattctgtgaccctgggcactgggatcacatctgccctctgttttcaaacagctggaaaaggcagcttacctagccttctccagaggacagtggggggagtaaatgacaggcagtgagtgacactgcccagaacatagtgcagacatgaagatacataggtgtgatgacaaaatagaagttacaccgtgacgcagttcataaagactccaggaacggagcaggcttctgctactggtctccagacgctacatgggcgactctagtccctgcctaaatatatttactctctctctctctctctctctctctctctctctctctctctcctctctctcagattcctgggaaatttattttcagctcatcttagttttttcatctctcagaatcctagaacaaaaaaaaaaaaaaagacctgggaaatgataaagaaccagggaaaattattcaaatcaattccaacacatttttcattcctaagggatcagtggtgtgcactgggacacacagacacctgagaatgctgttgcccttgaggtaacttaatatctctgaagttcagtatcctcatttgtgaaaaagtattaaagagatggcttagtggttaggagaactgtttactcttccagagctctagggttcaattcccagcacccacatggcagttcatcataaccctctgtaactccagttccaggggatctcctggactctgtaggcaccagcaatgtaagcacatggtatacagacacacatccaagcaaaacgcccatataattaaaaataaatacataaaaattaaaaagaaaacaccacaatgtgaccaggacccattgtatatgtgtatgaaattatcaaaaaataactaagtaaaaatcatttaaaatttctccagtaaaccagcagcaccctctccctcccccagctcctggcgctcagatccttgctcactgggagactggtgtgtgccgctcaggtaaattcctccactcctcctgattaactgctgtttgctctctcctacaaggaacaagctcatcaggaagccgccctaacgcagcgactttggaacagagaagacagacacacaggcaatgggaggagttcccattcataccaagacctggagacaactttaaaaaaaaagaaaaaagaagaaaaaaagacctgtggtgaaggtttggggcttctgtgttgctttcgaagaaactgcagtgacttgctgactgtgctgtctggttttgtgtcaactggacccaagctagagtcatcagagaggaaggagcctcagttgaggcaatgcctccatgagatccagctgcaaggcattttcttcgttagtgatgagtgggggagggtccagctattgtgggcggtgcaatggttgggctggtggctgagcaagccatgggaagcagcatccctccgtggtttctacagcagcttctgcctccaggttcctgcccagcttaagttcctgtcctgacttcctttggtgattaactacaatgtggatgtgtgagccaaataagcctttcctccccaacttccttttcggtcacagtgtttttgttgtagcaatagaaaccctaactaagacaccaattgacacagacatgttgaaataagtaagcaaattacttctaccagttttgagccggagacaaggataaagtcatcaaaatggctcaataggttagtgaactggttcatcaacttcgcttttaaaaatgttctaacaagttgttctcagcagagacagtggcagccaatgtcgatttgcacgaagcagcttggcgagtcatgtggccttcctgaagaaagcacacaccagctccctggaagtcagggtttcgcaccagcaacctttagcttctgaagagcatctccaaactctagaatctcaggccatatgctgggtggaaataaatctgcattctaacaagctctccaagaaacactggctaaaagcactagcaaaggacatgctttttttgactgtctgagtcatcgctgtgatgaaacaccatgaccaaatgcaatctggggaagaaagggtttatttgacttttgcttctgcatcactgttcatcactgggggaagtcaggatgggaaattcaaacaggacagggacctggaggcagaagctgatgggaggccatggagggggttgctgaccatgctcctcctggctgactcaacctgttttcttatccaactcaaaccaccagtgcaggggtggcaccacccacctgggctgggtcctcccccaccccccctcccgtccctgtcccccttccatcattaattaagaaaacacactgcagggttattgatcttattgaggcatcttctcaattgaggctccctccattccagtgattctagcttgggtcaagttagcataaaacttgtcagcacagtgactctgaaactgaaggccccagactccttctccctatcactggagtaacaaaagaatgggaagaatgaagaaatctggcactggggactggggttgtagcttagttggtagaattgcctgggctgcctgaggccctgggtttggtccctagcatccgtgtgggtgtggtggtacatgctgtaacactctaagtcatccccagccacagcagtgatactgttaaaacaaacagtctgggatactgtttaaaaacaaaacaaacaaacaaacaaacaaaaaaatcaagcattagccagagacaacatttacatagagccattagccaaccaaacaatgccatagaaagaaatttctattaaaatgtctaccatcagggaagatggatcggtggttaggaggacttactgctcttccagaagatggattcccagctcctaacaatctgtaaatccattctcagggggatctgatgccctcttctggcctccgtgggtactgcaagcacatggagcacagactggcatgcaggcaaaacactcatacacataacataataaataaataaatctaaaaacaaatattgagaacaaagaaactataaagataaaatcacattgtccatcaatagggaattggagttaggcagctataaaacgagaaaggtttgggtttttttcttttttctttttttcaatacagggtttctctgtggctttggaggctgtcctggaactagctctacagaccaggctgatctcgaactcacagagatttgcttgcctctgcctcccaagtgctggggttaaaggtgtgtgccgccatcaccaggctgagaaaagttttttagacattgtaaagaaaaattttcaaaacaaaactgtgtcctatgttgaaccttctagaaagtctgattaacagattaaattttcagtgactgtgaaaaggtaattacaagtaggagtttaattacaacttatcttgggctgtaattaggccccaatagccatttattgcctacctctgtctatgacctaatataagtagtgttgggtagggagttttgtgtgttggggggagtctgttttttgtttgtttgtttttgaatgtatgccagatccccagcttccaccaatccagaagctgagaaagtcatcagacagtaactgatgtaaacaggaggcctccagcagagggtccccattctgctgtcgcgcctaccctgtttacccgccaacacactgaaaaggtgtcttgacttgtggctttctttgttccgtttctataaaacttcccgtaattgccaccacaatcacaatgattcccagacccacaccagactcagacaaccactgacccctcgagccttatagttcaactcgccttccaccgttttcaccggaaaggaggtagggaatccgtattccttggaataaggctcctgtcctagttagatttgcattgctgtgattaacacaatgaccagaagcaactgaggaggaaagggtttcaggttacacatcgtggaaggaagccaagacaggaggcaagagcctggaggcaggaactgaagcaggagcactgaggaacactgctacgggctcatttcccgtggctttctcagtttgctttcttatacaacccaggcccacctgtaggggctcccacatcagtcagagtctcaagagtgtctattgctgtgataaaacaccatgaccaaaagcagcttgggaatactgattatgggcttgcccggtctgctttctaggactaccagccccggcgatggcaccattcacagtaggctgggcctccacatcaatcatcaatcaagaaaacataccatatgtcagtctggtgggtgtattttctcagttgaggttctgtcttccaatatgactctatcctaggtcatgttgacattaaaaatgggccaacacacactattcaagagaatgcatcacagacttgcctacaggccaatttgatggaagcattttctcagttgaggtccctgatgaaccagcttgcctccatcttaagcttgaaagccatcttagagtaaagacaaactaggttcattcctgttgatgatgaaacctctgtttctcaaaggttgggctatgccccacatgtaaccttaactaaaaatggttcggtatgtatatcctgttccaggaaacaaccaccatgcctttgtttcaaaaggcacaataatctttcaaccctacctttgtttcaaaaaattattttgaccacttatgtctaccttgttgtgactacctgctatggcttccttgttatccccaccttgaaccatgtctttgtttcaggaagtcatcctgactaagttgttatgtatatgttctgctcctgtaaccccacctatctttcctgccaaatcccccattggaaacctcctacccctaagctataaaaaccttgtcttcctcaggtccaatgccaatttctcaaacctcatcttagggggaagcagccctgaacatgaataaaaaagcttgctttaattaactgcttactttaattaatttggtcataatgatttggatcagtggtctttctccttgaatctttgggattaacagaaccctcttccaagatgacccacacttatattaagttgacaaaacaaaaacaaaaaacaaaaaacaaaacctacccagctcttttcagctcctttatccagtgaaacttgggggattctgacatggacacaccttcttggtgagtagtactggggtggtttgaaagaaaatggtccccaaaaaggagtggctctattaggaggtgtggtcttgctggaggaagtgtgtcactgtgagggcgggctttgaggtctcttttctcaagcttcaatcagtatgacagtcagtcgacttcctgctgccttttggtcaatatgtagccagcatctcccatctgcttgcatactgccatgctccccaccatggtgataatgggtttaacctttgaaaatggtaagctgccacctcaatgaaatgttttcctttataagagttgccatggtcctggtgtctcttcacagcaatagaaaccctaagtgagacaagtactctacagtgcgggtaccctacagcacagtttgtgtgttttgccatcggctgacagacaccaacatggctctccctttggttatgtatgaatccgatgggcatgagaggcctgatggtttccctgatctcccttacacacacagagccaaccaagtgtgcctcagaggcacaggctctgtgctgtggaaatagtgcgtgaggaggagcagtcctcgtcacagtttctgactgtgtctacccaccctgggatctacttgagtttttagacttgtgtttttatcatcgatatagctaggtgaggtattccattgcatctgaaatttgcatttttcacacaactaatgcactggctaattttatgttaacttgacacaagctagagttacttgaaagaagggaacctcgtttgagaaagtgcctccatgagatctggctttttattaattaatgattgattgatggggggagggcctagtccatctcgggtgatgccatccctgggcagtcctaggttctataagaaagcaagctgagcaggctatgagaaacaaaccggtaaacatcagctcctgcttcaggttcccagaatgtcttaccatgtagttcccaacgttcataatttgggaagcctctgactaaaaacaaacgaaaaaaaatacccaaagttctgtccaatcacacgatatatttagggagtttacaagtgtaaattctctgcctggcatcgctctcacggactctgtcatgcattccacacaaatctgaattcatctcctctgctggcctgtgtgtgagtgagaagataggatcaacacaaatgctgcttcctgcataggctggacatgcatgggaggggtttttgtaagagcgggacaacaggaaaaggtatctggctactctcagcaaagggaaatgaggacataatctctacattgtctgctagagtggaaggcaaaattgtacctccagagccttcttagaaattcctcggggctggagagatggctcagaggttaagagcactgactgctcttccagaggtcctgagttcaattcccagcaaccacatggtggctcacaaccatccgttatgagatctggtgtcctcttctggtgtgcagatatacatggaagcagaatgttgtatacataataaataaataaaatcttaaaaaaaagaaattcctctgacacattgatttgtgtgtgtggcagtggggaggggttcctgtagcagtgtgtgtggaaatactacggcctttttctccactctcatctctcagtaatttgccacaaaagtactttcttcttctatagaagatgcctaaccgttgttctccagatagagataaatgggaaaggatgctcacaaatggctttcatatcttctgtgtgaacctacccattcttattcactgtaatgtcacttcaaagattcacctgaattggctgcatctttttctcagccgaaaagccaaaactgcagggtggtggtggttcatgcctttaatccctgactggggagggagaggtaggtatatctctgtaagttcaaggccagcctggtctacagagtgagttccaggacagtcagggtgttatacagagacacctgtctgaaaaggaggaggaggaggaggaggaggaggaggaagaagaagaagaagaaaccaatttttatgctaatttttctgacccatttggaaatactaacaagagatggcagacgtgtatgtgttggttttcttgagcagatccacaatttgcacagtttcgataacagatattactgtggggtatccaccagagaggactacttagacatgggtttaagcccataggaagtcttggttaagcagctggcaactgcactggctgttcaagatcccagtgtagccctgagcttgttgtcgcagggtgagtttttaagcacaaaaactatatcctgggtttgcatacttcatttaacaagaacagttagccagaatcagaatacaagaaccgaaaagtaaggctattccatctagagactttcccagaactgtggactttgatggattaggtctttgttttagtttttggcaggccgtgctgtccacgtgctgagttttgcttccattgtggagtcagctgtgcaaaggtctagagacctgttgcaatattcacggtcttccagtgggagctgagagattgagggcgtagcagggttggtagcttttagaagctgtgaggggtgaatactccaaacctttctccttgacttgtgggtggctgtctccatacgaccccacccgtgtctgtctatatacacttacttaaaaatttctcttctttcaatttcatcgcctctgctaaaccatctttgataatgtttcctttcacccctcagatccaccatgaagcttccctagtgagttttgtatctctgctattaacttgtcaactcgaggaattccctccgggtcttcataatttctgtccctttattaccactctttaatgtgacactgtccatgtgcctcccttctttcatggtttcctcagattctttgaactggtggctgtgaaaatgctttctgaagtccaatgtgaaggctctctcactcagttttttatcagccacatccgggcacaggttctgctttcctctttccctggctctttgaatgtggctgtccagggcactcccctcagcctgctccagggcactcccctcagcctgctccagggcactcccctcagcctgctccagggcactcccctcagcctgctcctcagcaccctccagtgccaccctctccacagagcaagaactgctctgcttctctttctctcccatttctccaccacatatgtgctcagcccaatgtcttccacccgtccacgccaagcagagacagctgagcccctaagagtctgttttttttaggaggtgcctcagagcccctcctggtatatggtctgcttctcctaataggtaaaactctgacctattgctcccctctgagggacatccctactttataaactggtgataggctgagctgcctgctctggccttctgatctaccttttccatcgtggaatttctttcctccaagccagcgaagtaaaagatgaacctgagtggtccagcccaccacagctggaacatggcctcccatgaatcaggatgggaggaggaatgaagccctcgactgcttggttccacttccctggaatttagccactgcaatgtggaccctataagggagtgagaatccccctgcctctgccctccacccccacccctccagggagactgtaactattgcctaaaaactgaggaaaagggggatgttctggaccatgtctgcctgggatgtagaatctgttatgcagagaggggagaaaggccatggctccgacgtcagggacagtcactctccttactgggattcaggttttctgggataaatatgtacgtgttttctgtgtgttcctagaacagtcctgacagtttttctctccccattccgggggtcattggttgtttcgtatctgtataatgcacatatctagaatccgggtacattctctattgatcagccacattgaacaggacatgctgcccactcccccccccccaccattagccaacatcagaatcccatggtctagcccccagtacttgcagagatgccctctgaataaattatgcagtgctttgaaatgcaagcagttccaacctggggggacaaaaggagcttcactcagagctttggcggcatcaaatgggtcaatttgaagagcgctcttcataacgcacaggctggaactgcctccagcgctgtgactctcattacctcagcccctccgccaccgcacacacatacgcacgctcagtgcccagcacagaacaaagcacacagggaaccttctacacaaccagacttcacggcacactgtcgtttccccggtttgattggcaaagaatgactgaagacaccagttacagacagattccaggtccacacccagcagagtattgactgtattggttctgccaaggtctggagacttttaatagtcgttatgattgtgttaaattttcagccttgtgatgatggctaccatgtgacggtggtggcagcagtgtgtgtgtgtgtgtccgtctatccacagaactgtaggtggaggtttcctgtcccaactggactgcctggtcccaaataaccaactcagaggccaagtatgaattataaatgcttggccaatggctcaggcttgttactaactagctcttacaactaaattaacccatttctattcatctacattctgccacatgtctcgtggctttacctgtccttcagcatgtcctgctccctctgcaactcagtgactctcctgattctgcccttcctcctggccccggcttgctggtcaccatggcatgcgcatgtctcctctgctatgtgctcccaccatgttgtactgcactgcaacaggtcagggaaggatacatgatagatggaaactactggaaccatgaaccaaaataaacttttccacttagaacccgattaactcagatatctgtgacaaccaaaagttgaccaacacaatgtccttggtaatcaataaagatatgtaatgaatagctacatcattccattataattaaaaactcgggagtcttaaattgaaataaagacctgataaatccaaggacagtggagagagccagttggctagccctctctctcgccattattttctccctccaaccgccagccccggaaatcctctctcctctcttcctgtcctctctagcagacctcctcagtcctccaagaaatctatggccaaacccaatcagccaatcatcgactccgtcctttggttcaaggtggctttattggcacagtagaatggccataggaacaattctccagtaacaaaggtatagctcccacatcaccccaggctgtttgcatagcccatgcctgctgggttttcctgcttggtgctgctgaagggaaggctctccagaagccggattcaggctgtgcttggctaatgtgagacagagcagagaacaggaggtttctcttctttctctgccgcgggcctgctgtagtctgggctctaactccctctgtggcactgctgtctctgtgaagtgctgctgaggtcctcctgtttgctctctgaggaggaagccattcaattgagtgacattgttttctgttatctgggtaaccagtctgtcgtaatagatgccttgtgttgtacatgagctttgaacaatgtttttgttgttgtttgtttttttaaccctagttagactttcactgattagattttacagtgcttccagttctgttaaattcttcatttttattcattttgccctgttctcccacccacattatccttactggttcttagaagttcttcatgcattttattcctgtgtgtgtgtgtgtgtgtgtgtgtgtgtatgtgtgtgtgtgtgtgtgtgtgtgtgtgtgtgtgtgcgcgcgcgcgcgcgtgtgtgcgctggcgtgtgttccctgttacaggacaacgtgtaggagtcacttttctccttcctccatgtgggtgctgggtattgagttcaggtcatcaggcttgccagcaggcatccttgctagctgaatcattttgctggcccttcacaatactaatcctttcttggccacagtgtgggaaatatctcctcacagttcatggtttgtctttacattcttttttaaaaccatgctcagccttgtatagagctgagcatgaccttgaactcctgaagagcatgcttccatcttcccagtgtttagatcatggatgtgtaccatcgtatgtggcttttaaattctctttaaactcctttttatagtagtgtattttggtgaacagttttacaattcaatatagtaatttacttttaaaatacgtttgcctgacggtttgtggtttttgcagcttgtcatcaaggatcccccaaatctgctaaatgacacatccttttaaataaaaacttacttagtttcctcttccacatttaagccgtgattttgcacacagtgtgatgtagttttttatttttttctcttattcactgatcttatacatccacatatttacaaagtttgtttctagaccctccattctgtcttagtagtgtgctcgttaaattttttaagatttatttgtctgtgtatatgtgtgtgcgcttgtctatatgtgtactatgtgcatgtatgtggaatccagaagacagcaccagattccctataattggagttatggacaggcaattgtgtgcagtccagtgtgagtactgaactgaaccctgggcctcagcaaaagcacagaaagggctttgtggtgaaagagtaccttggtgatcagggccaacgagtgtggaaaaaatcacgttacacaccagatctcacaaaagagatttgttggggaggggaggacctgaaaggctgcctctgggcagggatgggagacagagacagagacagagacagagagaccaggccatgatggcatgtgctttataggggacatagagcgtgtgcttctggaaaacaaggcaatggaaacatgttgcattagtgatgatggattggaggtggtgtgggggttgagggaacatctggctctagaatgtgggccattctcagctgactaacagtcctaccttttgttcatgataaaaggaaaagagacaggaagaggtgacagtgacttaggaattgagggtaccatgctctttagactgcttcctgttgtctggggtgtcaacatctctggggacccaagaaaactgaaaagagtaagtaggctgtggtattcttggaggcaggaaaacccccaaacaatgtcttcaaggctgtggttggccctcttcgctgacacttacctctggccacttcccacaagtgaggcctgttctatcgagcatggtttcttgcctttcggccccatcaagccctggtaccaggtaaccacgaccctctcgggttggtcttctgttctttgcatgaggacacacaggacagcctatgcctacttatttcagtcctccctgaattccccctgggatgcctcttggaaaacctcgaacttttactcttagtgcccaacttaagggcttctaaacccgtccatctttacagtcaagactggccccaataccccttagatatcaatccaaatggccgctccccggaatcctatacagatcctttgcagcattctggcagtgatccaacagatggaagctatcttcaagcttgtatcttcgctccaagccccctctctagtctatcttcctgttcctactcagctcctgctagctgtgaagcctgttaagctgcagcattttcccctttcattgagtgaactttctcaaatagagaaaaaacaaaacaagacaaaaaacaaaaacaaaacaaaacaaaacaaaaaaacctggggtctttcacgtctagctctgcttctttcattgcagaattccaatgttactttccacagcaccaacctgcctctgccgcaaaagcggttagtacatgtcgccgggtccctttccatcatcagagacgggatatatgcaccctttaaaagcgcccgccaggcagagctcactctctttcccccgtctctaatttcctctcttacttctcttcctcttgtctgcctgcttctctcaagtccccactccaactcagccttttcactcttcactcctctgctcgccctctcccaacaaacctcttgcgctaactctattgcacgcagcatgtctgtttagtggcatagcttggcagggcccaccaaacctacgcactgcacgccggggccctatccgcctgctccacctgcaacagatccattctccttcaccggcagcaaatctgctttctcattaactcacaactttgtctttccttcaataccggcaattgggtccctggcggggctgcccgcctgaccgttccgctgcatgtgagactggcctcagtattccttgaaccaggctgtcagggaacgggagaaagacttctgcactttggaagcgtactgcattagtgatgacgacttgaaaacgggctcgggggttgcgggtaggggagaacctagttctggaatatgggtggttcttagatttcttagatgacaaacaagcaccaagtgttccgacccactgagccacgtctccagccctgtactatggtttttttcacattgcctgtgagatcctggtggcctgcaggtgagattagtccaggctaatggggtccctgctgggaggtattcaccacttgctttttactttcgtaacttcacttatcactgtaggactgggatgagatggtctttttattactacacaagaggaaggagaaatcagtgagggcagttgaacaattttcttgcccagctgtggattccataggtaattgtaatgcacaactgtgatatcgacctttataaaccctttctttagcccctttggtaggcatgctgtttggttctaaggctgtcatccttctgctaggagataaattcagaaaggataaattcatttaatatagatttgaattgagtctttggttccccctctccccccgaagtggattggaataccacaacacaatcagtatccttataaaagcctgtactacatgagaccctgtctcaaaacaagacaaacaaataaaacctattttagagacagggttttctgtatcctgggctggccccaaatttactaagtaggtaaactccttgaattcctgatcttcctatagctcccagtgggatttcaagtgtgtgccaccatgcatggtttacaaaatagttttgtacctgagtttccacctagttgtcttgcaaaaattcttttcatggtgacaattcaattgttagatttcctacatagatgatgccaaaggcatttaattttaccaaatccccttcctgcttcttttaaggccattatatatacattattttttcttcaatctatgctttttttttttttttcttgcactgaaggtgagttgagaggtaattgtctggctttcttgggaaaacaagagagcctggagactcatgagtaactctgcttgcactatgtagattaagcaattagattagcaattgataagtgaagtatctaagccataggcctgaagacaaattcacagaagactatagaacccttcctgggtaagtaattcagtccagggaaggtatcccccagagcccagacccttagatggaaaaaaagaggagtatagggtgacaggtcctgtgtgtagggagaatgtgtgggacaaacaataccagcagtaggctgaagccatgatgaccccgacactaggcaggagcagtcacacccaggcaggccacagggcagaggatctaaatggggacaaatgtatgagcattttaactgcaaattcaaaatgctaaccttctaattcagaagcacattttaaaataagattatatatttactgctctctgaggggctggataagatgtctgtgttgtttggtgtccagaaacaacgggcagaaattattttgaataaggtttgtttgaagtctggttttattcctgtgggtgtgagtcccgttccccctccccccagtgttggggatagaacccagggccttgtgcaaactgcctaagcattctcaatgtggtacagctacagtccataatggatgttttcagtgattttactcattaatgatttaacattgtcaaagcttcccccagggtaatgcttttcaacgtttgaattagacttcaattgggtggtcgttgaaatgtcataaaaataaaccactgagcccagcatggtggggcatgccttaaattctaccactcttgaggcagacaagatgctttctatgagtttgaggccagtctagtcttcatagcagctccaagccacccatggctacatagtgagaccacatctcaaaataaataaataatttttaaaaggaattgcctatccaaaaattaaacaaataaaagggaaacatttaatgtatgtggaacaatgtgtcaaggtcaaggtgtggctgttgtcagacttctaggaaagctatttctgcttaccccagatagacagcaacaacagcctacttaaattattctctccagctgggtgcaccagcaattttattggcaatgcttacaggagtgtgagtggctcagtgactgcatcaccaaacagcccacctgagtaagcatggatgatggatgattcaggaacctgcatggctcgagttccttgcccaacttgcaggtggctataccactgaagagtcagtcctctttgccccagcttttgactcttgtggaatctcagggagcaggcttgtgagtcttgtaaattttgtgagctaaccagagttcttttttttaaatttcttttatgtttttttgagactatgatataattatatcattcctacccccttttaaagatttgttttatatgaatgggtgttctgcctgcgtgtatgtgtacctcatgcatgcaatgccttcggaggccagacagggtgttagactctctggagatacagagttatcatggagtgttgtgagctgtctgtcggtgctgggaactgaatcagggccctctgcaagagcaccacctgctcaaaaaggaatgtttcaatacagaggaaacggcaatacattggatgtcacctaaattgcccatcgagaactatgcagatgaagacggtgtttaacagaagacagacagcatttagagtaactggtgtgatggcctcattgcagggcaataaaaaggtttgaaagacagaaaggaaaaacaagaacttgttagccccaaaggcttgaatgtacacttctgttagcttttctatgtatatacattaagaactttaaaaaccctacactaggctatggaaatggttaagagcacttgttgctcttgcagaggacctggcttcagttctgagtacccacagggaggctcacaacacccatccacataaaacaataaataaacattaaatattaaaataaacagggtggtggtggtggcatatgccttaaccccagcactcagaaggcagagacaggtggagctctgtgagttcaaggccagcctggtccacagcttgagttccaagatagtcaaggttacacaaagaaaccctatctcaatcaatcaaataaaactatactaaagaaaggtacttgtctataactaaagtagtacccataactatctatagctcaaaatctttctgtttatctcattttatttcatttaaaaatttttgaaacagactctccatatgtagcacaggctaacctcaaactcattatctttctgcttcatcttcctgaatgtagggagccgtccctgcattctccattacaagatggcgcctgcatccggcaggcaccgaatggtaaacaagttagtgcgcaggcactgggtaactttccatcccttggtctctgcctctcccgtgacgtcatatggtccgatgagctgcagccagtcagggggtaacacgtccgaggcggcggttgccagcctatataagggatgggtttttgggagttcggggtctccgctctgtaagcttatgctctccctctcaagatgcattaaagctttactgcagaaggatccgagtgtcctgtgtctttcttgctggcgagacgatcgcgcgggacacctgaatgctattagcacaaggctatcccaccactgctccaggttcttttacatccccaccctttaggtactgggggttgaacccagggccatgtacatgacacttagaaactctgacactgaactcacttctgccattcttttacatttctaggcagaactgttgtataccacagtacaatatagcttgaaatatgtattgtacttcagttgttttggtttttttctctagtgtgaacttcttgaaaaaaaaaaagcaccattataagaaattataaggctttgttgttgcttttttgttttgttttgttttttggtggtggtagatcttgaatctagcatcttattgggcattcatgggactctatctccagtattttctctttgggagagggagggagggcactgggttttactgattttcccagagtctttttgcattggctctgtagcccacgcaatcctggacctggtgatctttctgccctgggtttctgtgcagctgggatcacacacaactgggtcaccacacccagcaagaatttcttaatgccttcaccagtccaaatgacacttgaactaaataaacatgacatcaggggctagcgagacgattgagtgattaacagtgactagtgcgagcacaagctgcttttacctcccctccatgccttcctcagcccaaaggcccctgaggtggggccggatcatgagcctgttgggcagccgcctggcttctgagcccagcatccagctgtctagcaaggctagaatgaaaaatcttccaaagaagagccagaacgataagtaccggttgaagtacttgcgactgtacaaagtggccatggccacggtgtttgaaaacgctatttgtgatgaaactgctcatcttgaggaaaactttcttaaagcgaaagagagaagaccctgctgcagaagcccttacggcttcaagctgtaactaactgaaggggaaccacaggccccagctccttcccactgctccagtttgctcctggcttaaggtgtggcccgctctgtgggaactatccagggagctggacccagcgttggggacaaggaaccatttgggaagaaatccaaggcgaaaaaaaggaaaggacaaagagaaaaacaaactggaagttctgaagaaaacatcagagaaaaagaaaaaggaaggaggcgctcacaagctcgttccgccactgcactgaattcctctttgggtggctggtgctccccattgggtctaacagtagatagcctggggagatccatcaccaacggacccggcttccatgatgagagtgccatctaccctgtgggctactgtagcactaaagtgtatgcccgaatgaagtgcccagaccagacgtgcccttctctgtcagatccagaatggtggtgtttgaaattgttcctgaagaggaacccagagacctgttatgaagaactgctcaggaccatcagtgcctaacccactttcatgtggtgctgacttccttgagttttctcatccagtcatccacaacctgattcagactcgtccagaagtttaaaactgtgtcaatgatggatgcaaacccaggaaggggcgactctcccaggagctgccacagaaccatgcatctccaagccttgaacctttgagacacagacctttgatgatgaccacgagggttccattctgtcgggatccctggtcctacccgaacttcagcatgaagtctttgtgtcatctttacctgccagaggtcctgacacacaacccttggtggatgctgaaccacagcacctgaagtgtaggctgtcacactgtagcccaaggcagtctccagattgaacaggaagggggtagagaccacttccttttcatcatcatgactttttaacgtaaactaaattttcctcttcatggaagaggaaaatggcagcagttgagaagcagagaagatattgacacggttcatcgtgggtgttcctgtgctgacagtgtaccctgggataaacttcagtcgcttttatttttagtaataaacacatcttgacagttaaaaagtgtctattgctcttatagagttcagttcctagcacacatggggggtggatgtctcacaactgcatgcaactccagttccaagggatgtgataccctcttctgacctctgaaagcatgcgcacacacacacacacacacacacacacaaacacacacacacacacacacaaacacacacacaaacacacacacacacaaacacacacacaaacacatacacacacaaacacacacacaaacacatacacacacacacaaacacatacacacaaacacacacacacacaaacacacacacacaaacacacacacaaacacacacacacacacaaacacacacacacaaacacacacaaacacacacacacacaaacacacacacacacaaacacacacacaaacacatacacacaaacacacacacacacaaacacacacacaaacacacacacacacacaaacacacacacacatacaaacacacacacacagtatatacagatataaactaaaaataaatcttttaataacatcatattatttttaaccctttggaacaaataagaccaatgcatcacagcttggttagttgatcttttaattcagttgtttttccctttttcaattagagaactcagagctgtagggattttgttgattgcatcctgtagtatagtttagtggattcttctgttatttgtagttttttatacgttagttgtatctcagacccatcagactaggccttctatgtgtctccccacctctcttgttaaggtatgcgttacagcagtgcaataatgcctgtgtgtggtttatatttgtgtgcatttgacttcttttggaagactcttccggtctgttaatctttgtaatcttttttgttttgtttttctggtttttttttgttttttttgttttgttttgttttgtttttttgagacaaggtttctgtgtataacaatctgtcctggaacttgctctggagacctggctggccttgaactcacagatctgcctgctactgcccagaagtgctgggattaaaagcctgagccactaccctaccgcatacattttgtaatcttaattagcagttcctttcactccctggccacaagtctgaaatcagggctctagcctatcaactactacacccctaatccctaaagttccttagtgaaggagtaacacattttgaaatcaccctccttccccaacacacacacacacactcacacacacactcacacacacactcacacacactcacacactcacactcacacacactcacacacacacactcacactcacacacacactcacacacactcacacacactcacactcacacacacacactcacactcacacacacacacacacacctcgctcaggaagtttcagatgatcacttctgttacacatatgattaagcaaccatcagttcaagagaacattagagccacaaaccccaccccatctctcccttcccttttctcaataccatggtgagagaagcccgaaattccactggactgtcaggcaagagcaggatcgccagtgggaggacagcctaggctaggtagtgagaccctacttcaacaaaccaaagcaaagtaaacaaagcaaacatggagggggggcggagagataaaggagcgagagaggggggaggagagaagagcaatcagaaagttttttatttctccggaggtttttagttccagaaggcaaccaatcatgcatggcacaacggataatatgctattaaaatttaaaccaaacttgggccctttgccatgtaatcaagccggtgatcttctgggctcgtggagaggtagccaccccgaaatactccacccacggaggcgctaaagcggcagccttatcgggccgcagacttttccttcccttttcaccttttcccaggctgcgcgcgctagcaggcaggcaaagttctgggcctccgaatccaggccccgcccactggccagttcgccaggactccggacggggcgtggtcacggcggggcgtggtcttaggccccgccccttcggcgtctccgctgctgaccgacacgagccgggagggagagcagccgccgccgccgccgccgccgccgccgccgcttgagcgcagccgggacgcgagcgagaggcagagcgggtccgcgcgccgccgccgccgccatggggagccgcgtgtcccgagaggatttcgagtgggtctatacggaccagccgcacgccaaccggcgccgggagatcctgggtgaggaccggcgccccgttatgtgcgcgcggccgtgtgcgggccctgcgcggcctcccgcgcgccccgtgtgagcacggcctccgaggctccctccagacgcccggctggtcggccgccggagcgcggggcgcggggcgcgggcgggcgggctccgggcggggcccaggccccagggatggggggcctaggcgccccgccggccctcgggggtcaggcgctggcggcccccgccggctgtgagttgacggccccccggtagggcgaccccgacggcggcaggggtgcgtgggctcgagccccaccgcccgctaggctcagggcgtggtcctggggcatccccggggccccgggatccttgatcacgtgctccagccagccgcaggcctagcgggggaccagctcccggtagcccgaggcttcgcggactgcacggctcctccgggcgtcctttcccagtcttctgccggactggccccataggaaaggcgcgagcgagcctgagcctcccggacttgaggcccaactgagtctggagggtatcaggggtttccgagtgagacagagaagtctcgtccctgcttttaaagggaacggtatgttcttgagttgagagctttgcataatatcatccactttaattctccctttccagtgcttgtctggccacttaaaaaagctgtgtggggggtaatgttatgaagactattcccatccgggttagactgcagccgaagaatatgctttttttttttctttcctggtgctagatagagatcgaaaagttttttattttaacttttgctgtttctttaaaaattgaggaaatcaataaaagaccaccaaagacgaggaactgtcttatacccaccatttttacactcgtaaaaaaaaaatctttgcccattgggtggctgaggtcctggtttgctcagtagtagctaaacttaatttcgtgtttcacacataagagtagacagatgccattcaaaatggatctttaccctcctagtcctggaatccaaactcagggattcctggtactggttggttctccacctgagagctgctcccctggcttcttctggagaacttgaattgagtggctaggttggaaaggtgaaactttatcaccggctgtgctgtcagttgctttgggctcttaggtttggctagtcattgcctcactgctgtggtagataccggaacaacacaagggaggaaggacttattttggctgatggctttcatcggtggtcacggctgccattgcttgggtggtaatctggtaaaataatggtggagaggtcttgaaggaataaaggccggttccccctcatgctagccaggaaggagggagagagagagagagagagagagatagacagggagggaaggagggagggagggcggaaggaaggaaggaaggaaggaaggaaggaaggaaggaaggaaggaaggagcgagcaggagcaggcaggagcatgtcttctgtggccctgtctccagtgaccagctccgccccctatatgccatcattttgtgaatccttggggagattctggtttctccactatctagttactgcctgtgttttcatgtgtaggcatgtgggtgtgctcccatcacacacacacacacacaccatagtgtgtattgtggaggtcagaagacagctttccaggagtgggctttctccttccaccttgctttgaggcagggtctctcttgtttctgcttttgtgctgggcatttcaagctggctggccccaaagcttcctggcttctctggaacagtcttccctcacagcaggttccttgccatactcctgctgggattacagatgtgcaccaccacagcgtgctttctgtgtgggttcaaaggagtaatctccgggttacccactaacctctccttctgactccacccttccttctactgcagttttaatctagcacctcgagcaagctagtcagatgctctaccattgtgttacaactgtctttaaatgacaatggttttatggtctctgtattttcctaacgatatcaagtatccttcatgtgtttttttgggggaggggccgtttataaatcttttttattagttttttttttcttttttaaaatttggattattagttgagttttaagtactctgcatattctatatgaatattccatatgattctcttatggaataggtgacttgcaaatgtgtctgcctgtcttttagattgtcacgtgctcttttgatggtattgttatagaaaaagaagtttttggtcctcccccccccccccaggcagggtttctctgtgaaacagtcctggccgtcatggaactcactcagcctgcctgcctcttcctccccagtgctggagttaaaggtgtatgccaccactgcccttccgaaaaagaagattttaatgcagattcaatttactattttttttttcttgagttctacaattttgttacttagacctgtgatccattttgggctaactcttttggtgtagggaggaggtccagcttgattttttgtgttggtaacactttataaggtcagtactgtcctttcctacagttatatgaggcccttatatatgggcttggggagtcaggatcttactttgtagttgagactagcctggaatttgctaaccatctcagcttcctgcatgctcagatacaggtgagtgccactgtgcttagttggctttaaagttccgtgaagattcagagtagaattacttggaggaagttgactggtctgagagaaccaggaaaatgcgttttataatttgaagatgtataaaaacaaatgttatgttctttcttgtgtcagctgtgacaatttaatggtttatataagataaatatgccagagcttcagttagagagatagctcagtgttgctcttagagaggacacaagttcagttcccagtgctacatggttgctcacactgtctgttactctagttctaggggaattcaatctcctcttctgacctttgtaagcactgaacccacacagcccacagacatagtgcaggcaaaacactcacacatacaaaaagaaaaagaaaagaaaatatgtgtagggggctagagagatggcttggaggttaagagcactggctgttcttccagaggtcctgagttcaattcccagcaaccacatggctcacaaccatctgtaatgagatctggtgccctcttctggcctgcaggcatatatggagacagaatgttgtatatataatcaataaataaatcttttaaaaaaaaaagaaagtatgtgtgtatttgtctaagcatagatgtaattattttaatacaagagaattcggaatttaatttttctttcataaattgttgtgtcatcctattttgtgattttcttaccagaatacattccttccctttaggaggtgaagtctataagggggaagtattgtgatttagaaaaggggaaaatctaattgcattaattatagttgctgaactgttgtgcttttctttgttcctgattttttgtattttctttccttacagcaaagtatccagagatcaaatccttgatgaaacctgaccccaatttgaaatggatcataactgtgatgcttctcgtccagttggcttcattttacttagtgaaagacttggactggaaatgggtcatattttggtcctatgtctttggcagctgccttaaccattcaatgactctggggatccatgagatttcccacaatttccccttcggccaccacaaagctctatggaatcgctggtttggaatatttgctaacctccctttgggagttccatattctgtttcttttaagagataccacatggatcatcatcggtacctgggagctgatggcatcgacgtagatattcctactgattttgagggctggttcttctgcaccactttcaggaagcttgtctgggttgtccttcagcctctcttttatgcttttagacccctactcatcaatcccaaaccaattacttctctggaaatcatcaatactgtgatacagatcatctttgacattatagtttactatgtttttggagttaaatctctagtctacatgttggcagcctccctgcttggcctgggtttgcacccaatttctgggcattttatagccgaacattacatgttcttaaagggacatgaaacatactcatattatgggcctctgaatttactgaccttcaatgtgggctaccataatgaacaccatgacttccctaacattcctggaaaaaacctgcccctggtaagtgaaagacttgatgatgttgtaatcaaattagtcatggcttgcttattgtaacagtgatctagtctgttttgtcaggtaaaaaggaaaacatatcctttgtctgcctgcctaacttcactgaggattcatatcttctgttttggatccttaggcttagtggtcatgcttagagttcagacgagcaaatctcttacctgctaaactagctcaggattagaaaactgctgctctgtgtggtgaagcatccgttcatggaacattcatcactgttaagctgttgtatttggctaagatgtgttgcttttgtaacacacagggaaggaaggtgaccttcataagggatctgtggagtggacagtgtcagtgcccatgttattacccttccctggcaggggctctgcctggacagtagaccttcagtgtgttatgtgtgaagtaagcacaagaagacactgcacccttcattctttccatctttcccaaaactagccactcagtcagtagctttcctgccaagccttctcaacagccttcccatcttcacagtgagtagcctgacactggggaggcagacacaggaggatctctgtgaggtcaaggccagccaggactgttccacagagaaaccctgtctcaaaaaaaaaagtgagtagcctattctgttaggaaaaaaaaagaaaagaaagaagaaactctccataattctaaaaaaaaaaaaaaaaaggtaatacatacgaaaaatagtttttctttacttaaaaaagagatgatgtgtataagggagccctaatggatgcttcatgatgtcatactcattcaaatttttaagcactgttgaaaaattacatgcaacatgacaacaaccaattgcaatatgtgattatatctttggatctggttaaaagactgtaaacaaactggctcagtgggtaatccataaaaatccataaaaaatattcatcaaggttagattaccaggtataatggtgatagggttttgtagaacaagtgtgctttggaaataagtgttgcagaatttggagttgaaatacaggttaagttggcacaactaaggaagaaagcaaagagtccttttgttacctgcacagtacacgtgtaagtgagtcaaagggctgattgggaaacaggtgaagagcaaggagggctgccttatatcccactcggcatttcagttggagagaaagcagcaccgagtctgtggagacacctgtactagcagacatagtttggcagcctctgtttccctcatctgtgacaagggaactgagtttatttttttagggaactcatactttgagaaaaaaaaaaaaaaacacaatttaaggagaagaatcagtcagccattaagcaaaaaatttccctcaaataatgtgtattttcctggagcagtccccacattaaaaacttagtgtagttcagacggcactcacttaaagcctatggcacatcagtgactcctcactgcctgctcttccttcctgtctccccactcttttgttaatgcacagttaacagccctaaagtttgaaagccctgcctttcctgttcttctgtctatgaggaattgtttattcagtaactacctgacatttattacacagtccctatgtatattaatagtttaacttttaaaggattttttcatatttttaatgagttctgcacctcacaagcatttttcattttaattcttgttttatatatatgtatgtttgcaagcatatacgtgtaccatgtgcatgcctattgccttcaaaagccaagagacagtgttagaacctctggaactggagttaacaggcagttgtgagccaccatgtgggtgctggggtcctgtggaagagcagccagtgctcttagccattgagctatttctgtagctccaacacaaaactttttttcttgttttgtttttcaagacagtatatgtctgtataacagctctggttgtcctggaactcactctgtagaccaggctggcttggaactcagagagatcggcctgcctctgcctcccaagtgtgggattaaaggaatgcaaatgtaccaccacaccctgccaaaacattttttaagcatacattttttttttcagtttgttcatcacaactttctaagaatcacagccatcatgtgtcagtgtatgaattggaccttgctgatagataccccaggcttaattcttagtattgaggatttgaggtttttgagctttatgtctttataatgtctacagttcatctacttctgatgctaaagatgatctttagagcattttcagtctcaggagtgtcttgactcaagtgcttgtccaggctctgaactggctttattattttactatttggaactctagcatctttctgattgctacggactttgccctaagtctagtgtgggttatgctggagctgtttatgtcatatgatctgcagacatcttatttcatgaaaaactgcaggctgtctgaaggatcataagcaaaggcattgccctttggctcatttggtattttgtcctctgtctgtcagacactcagctgttatcttgaggcctcagtaatactcactgctcacctttctgtgtttgttcacttccaggtgaggaaaatagcagctgaatattatgataaactcccccaatacaactcctggatcaaagtactgtatgattttgtgatggatgacacagtaagtccctattcacggatgaagaggcctccaaaagggaatgagattctggagtaaatatcacagcccaaggaattcctctccacagcttcataatagctgatagagtggaatttttatcttgttaagcttaagatgagtgatgctcagaagctgcactggtgtaatttccaaccaggatctcagtggcatcagaagctactcagccttcaaaccgtcagctcttgcgcttgtgcccacacattgtgttactgttactaagggtgtctccacctgtgtctgtcatactgtaagcatatcataaaaagcttattatgttattttcactataaagttttgctttattaaaacaactaataaactgaactgttaatcgcagcatattaataatcattgcatttttgtattttactaactgtatgctatagttaccagggtgctgcgggaactcaaaatttcattcagaaatttctttacaggtttgactttagctcatatagtattgtgtaactctcctctggatttaaacatgtatttctggagggagaagggaggcttataagattcaggaagctgataaaattctccatcacaaagtcctctcagcctctgtaaacaataaggctttctggaggagctgtctgtgagtcctacagggagccaaggattccatccttgtgacttttgtgaatttgccacccttgctgcgtatttcactgatgcaactgcctttgcgttggtaatttagtaacccaaataaactcactggtttactaaagcagacttaggtaaaaccgtttctttgatctgtttttggtacccaaactggcatccacagatacgtgttcatgtctcccctgggaaagtcctataagcataaaaggatgagatgggaatttctttctctgtaaattactgagctagtttttgtttgttggtttgtttttgagtcagggtttctctgtgtagactcggctgtcctgaaactctctgtagaccatgctggcctccaaactcacagagacccacctgcctctgcctcctgggtgctgggattaaaggtgtgtaccaactggcaagttatttattcataatttttactgttatccgtgtcccctaaattaggcactgctgggtcctggataaagtctactaaatttagccatgcccacatcaactcccttcctctttcagccttgttgactctcacgtcggaaacagctgacagactttatgttctcgaattgctgtgcaaacactgggttggtggtgggtagttggtttctagtagttaacatcctgtacttcaagaccaacagtcccagttacctcaaaagtgtcactggggaaaatgcagtgtaatttgggaagatagttttaggatatcagctgtattagtgagggtggcccagacagctgaaaaagagaaccctctgtgggattggcatttcctcacactcccagtgtcatcctaaagtggtttttctccctttctggcctggaggacccggaactcctgccaactgtccattcttcaagagattcaccaagtagggcagcaggaaggctaggccccagtcccttcagaggcctgaggggtggttcagccgcttcatggcagttcttgcaactgtcttggcttgtgccacccttccctgcgtcatccctgccccatagcagtcaggagcctcgtttccagtggccacttcccttacagctttgactctgtgtaatatgccattcgcctcccctgaggtgggggcaagtgactgacgtctctgtcccatcaactgaacaagccagtgctagactgcagtcttggttaatagaatgagattggagctctgttattttactgagctttatctaaaagccaaagacagtatgtgtttgtataatctttaggtaaatgcaatatatttatttaaaacaagggactttaattgagaatcccttttcagtgtttgccatccatctattatctttaatttattcttgtttgcagcactagggatagaaccccaggcaagtaccactgagatactcccccattccggtggtgtcttactctcagcatctctatgtacgtaagtagagagatgtatgcatacctatgtatatttatacataatctatcaatatacatacatggtaccaattcattttgtagataaaaactaaagctaagagagattaattattggtcgacgatgctttaggtccatgtcttgacttcccccatagtaatggactgtagcctggagttgtaagccaaatgaacccctttcctcttctgtgttgcttttgatctggacagcaacagaaataaaactaggacgatgctcaacagtgtaagggtttaaatatgaagcactgttcaaatccatagcaaaggtgcgttcgtttgttcattcgttcgttagcaagcatggtgccaggcggcagtgttggtgccgtgatgtcaggagacgcatgtcctgctcggtaggatgcacacagcgggaggtcggcgtgtggctgatgaggtggagggtggactatctgtgctcccttctgcctagtgcacacattctagtctgtgtcagcctaatgagtaacttatctctactgttcaacggatggctcaagggtgagcagcctgaggccacatgataacattgagggcttgtaccaactgtcaaagccttaactcttggtatcccacctgctgttgatttggaaaatctttgttgttgttgttgtttggccaagggatattgcttcttgtcagagaaaaactaggagctgttgtcatttggaatgaaagagcagtcttagggcctggagttagcgatgacccaaaaagcccatcaagcgttcccagcattcttagagtcagcacagctgagacttctggcaaaggtccgtcggcctttaaaaggtgacaactgcctgaagtaagaggcctggagctagtcagctctgccagggcacagccaaggggagggtcctgcctttggaaggggtagggtttgacaagaaatggctctgcaggtcagatcatgagttctctgaaaattcagtcagtggcacagcagaggagacaatggggatcctcatccaaaatacaaaagcttagcttgtgccaaaatccgtgtgatccggcagatgggtcaggaagtcagtaatacacccagggaaggtttcaggtgctggcacagagtcccgggggtctgtgaagcaaggttgcatggggtggggaaggaagcagctggaacagaaccttctgaaaagacaggtggggccacagaaataattaataaattgtttttgcagtcaagcatgggttaatggtgactgggcacacatcactgtacatataattaatcctctgtaaaggggtaaatggatgctttgtgaccaaggcctgcaagaatggacacaccctctcggtgatgtccaaatcctgctgctcagcaatttctaatccaaggaaagtctccctaatccctttcctgtattaggtaattctcagaagctgctcttcctggcctgtgaggggggttcaataagacccgagtgacatttcctttgtccagtttgtggcttgagcctcattcccataagagtgagtaacgaggatttctggtggtcatgagagagtgtctcccctgcactctgaacagcagtctccctggtggtcataagcaagcacatagccggaatctgcacctcctctccaggctggagctccctgagctgggaaaacactgcatgttagctttccagcttttgaacacataccaattcaacaccgcagctatgagaacgttgaacacgtaccagttcacaccgacgtgggaatgctgaagctccagagccttccagaggcagtcattagcaagtggtgagcctccatggccagtcgaaggactgtcaatggtgacctcccggggtgggctctttaccctacacccatgactgccttccactgtgggtcccagtgtcagtgctcggagtaggggtgtgtgtgtgtgtgtgtgtgtgtgtgtgtgtgtgtgtgtgtgtgtgtgcatagctactgtccagtctcatcgacccatagaaccatggaccgctgagaagcccatgcatcatctttgggatttcttcatagatatttgatcataaaccagtgtaggagctcattctatgtccccaacgttaaagactcagaactgaaaacaactgcaggttctagttcaatgctgccatccttcatttgcacaactaatttttcaacatctgttaccttctcaaaaatagattaaaaaaaaaaaaaaacaagagaattcaccacatgtcaaggaagcaactgctgccagtcctggaaggcatcaggctgtcatctttgtgtgcatctccttccctcagagcccctcattctcacacttagccctggcccaattacaagccatcacacaagtctttgcctgccttaaagaaatttgcagccctttgtttctactagggtagacagtgagataaaggaagtttttaagtaccccacacacacacacacacacacacacacacacacacacacacacacggtctcttgaaaggtaagtgggctcttagctcactgctctggagtcctgactgtgtgtgggttctgtgtcagacacaggcctgattctgtgtcacgctccagctcaccatgcctgagagcacttgaagggttcctgagtttatccgtatggacaccatgtctgtgcattttgtttgttcctatattatctccttaaaaaaaaaaaatcagaatactattgcaatcttgtcttgggaaaatggagcctttgagttggcaagaccatcaccattgaatacacacattatacacacattagaacattgaaactgagactctgaagatattaggtaacttctcaagttagttagcttggcctcagaatggtggaagaaccagctacccctggtaatttgaaccatttttattctaaatccaagccctgtccccaccctgtgacaccacccttcaattacctggaaacgtgtttgttgactggggaataaagagttggacagtggtaagtgctgttgggactgaatgctaagcccgggatgtggtcattgcaaagacgctgttcacggtgagagctggctgtcttcaccttttggtcctcctccccccacctccatcccggttccagggtgagggagaggaatgctatgaggtgatctcggtttatagctgtacttccagggaaatggtgacatttctccagacctgtctgggcctggctgaggtgaccttggccctggaaaggtttgttttgtaagttaataacataagcaagaacatagggaaaacttcagcagagcacacggaataacatcaggaagtcaaactccgtgaaaactaaaggaccgtgaccacaaaggtgcatgctcatctccagagaaacctgcctgacagaaggatggggtttctgtcctgagcccactcaccattgttcgagtctctgtgggctgtttaatcctcatatattacttttgtgattcatccaagaaaataaagtaacaggaaagagtaaataactcccataacgccagacgacctaagttcaaacccagtgtctagactcaaagcctacaacttcatagaaaggacttttacaacaaatgtcaccctcaaattcagagacatcctccaagttagtctaatgtgtgacagttttttgcatcaattcagtcaccacagggaacatgggcagaccagccttggtttgggtttggagcttctgtttgttttgttatggcttttgtcgttgttgttttcctgtactctcttggtcaggaatgctgactcagaaaaggaagggcttgtggcctagagttcaggggtgttgtttcgtttttatgtgcattggtgtgtttttgcttgcatgtgtatctgtgtgagggtcttggatcccctagaactggagctacagacagttttaagctgccttgtgggttctgggaattgaacctcggacccctggaagagcagccagcgttcccaactgctgagtcatctctccagccctggagttcaagtttaaacaaacatttttttcccatagctgttttagacacatgattttatgagcacgacttcacacagcttagtgtagatggtccagttgccacattgggaaacaaagccaaactgacacaacagagagcccggcttgccaaggagagagagaggtggtcactgaattaacatctcagttccagtttcctgctcaggccaggaagataaaccccaacttctcaggccatcccaggaagagcccttgagtggagtccttgacctctcagcacagccgtaggaaagaaagtcaagatcagctggcagggatgacaaacggtgatttctctgagtccatctgtcaacctacccacgaggccgctgcagtgccttggagatcagagaaagtcaccagcttctttgacactgcaggtgcctcaagggtgcaggttcctgtggaccctgggaatatccaggttttattccgctgaactggaccaacagcaagagcagtcacaactataccagaccatagcagacactgctgccccaatatcgtttgatgtcttgtttttaaaagctggtaaaatgaacaaatgcaggggtttggagagatctcagtagttaagagcaatggctgctcttccaaaggatgtacattcgattcctataacccacttggggtggctcccagccatctgtaacaggggaccctctcttggttcttatgggtacctgatgtgtgtgcacacccatatgctcacacacaccttcaaggtttggtggtatttagcccactcacagttgtacaaccacacacacacacccccacacacagacacacacccatacccacacacacacactcacacacacacataaacacacacactcacacacacacacacacacacacacacgcacgcacgcacgcacacacacacactctcacacacacacacacatacacactctcacgcactcgctctcgcacacacacacacatacacacacacacacactctcacacacacacacacacacacacacacacacacacacacacacacacacacaccccttcaaggtttggtgtatttagggcacttaaatacacatgcacttgttcaaccatcctcagaactttctcaccttacagaactgaaatttgacacccattgaacagtcttcctttcctttcctctttgtatatgagggctctatttgcatgacagaagaggacatcagacagaaaagtggatcagatcccattatagatggttgtgagccaccatgtggtgctgggaattgaactcaggacctctggaagagcagcagttctcttaatcgctgagccatctctccaccaacctaaggaatttttaagatagctgaactctttgtctgtctgcatccataacagacagagcctgtttcacacacactgtaagaaagagaagtagcagtcaggggtggagtcacccacccccaccctaggtggtgatctctatcaacacgctggtgcatttttccctcctggaggctggctgctcttgtagaaggggccagggaagatgttcactgggcctctggatcctgtattcttttccgagctcagggctgagctgggggatagaagccagtcttccatatttaaagccagtgttaaaagatattagccgggcattggtggcacacacctttagtcccagcacttcgggaggcagagacaggtgcatctctctgagttcaaagccagtctgatctacagaacgagttccaggacaggctccaaagctaaagagaaacctgtcttaaaaaacaaaaacaacaacaaaaatgaaagccggttcctccattgtttgtgccttcatagtagctcatttgtttatttagttggttagctgcttagggtttttttttttttttttttttgaaacagggtttcacatcacccaggctaagcttgagctggttttcctgcttgcttccacctctggagtgctgggattacaggcatgtactaccatgcctgactttgtctgatttgcttacttaattgcattatttgcatagatatttatcctaggactcagaaactgaggaaatcaggttccaggtctgagcctgctgtgagtgagagtgatgtcaaaaagccccgaggtggtgagctgaagactgaggagaaggtctctcaagctcaggcagaggcagccctgcggcctctgccctccctttttcccacaccccttcaccgtgtaccagctccagcagattctttctgttccacatacccaaggctgtcacatggcggggcctcctcagctcccatgtggaccctggaccaagcccagtccagtcaagcaagttcttccctacacccagccctcggctcagaggccaacttttggaggagtctttctaatcaagtgtctgactttcacttacatgcaagacagccaggctgcagattaactagggatggagaactaaccctgtgtgcagtgggggcttgagccactgaaagtcccgagacaccggaagggcagtcccgagacaccggaagggcagtcccgagacaccggaagggcagtcccgagacaccggaagggcagtcccactggtggttgcgcaggcctagagttcttcactgagttctttcccgggttgccacttcatcaccacttcagcagactgaagacagagcttctgtagcccaagctggctttgaactagctatgtagtcaaagatggccttgaacttctgctcccgactctacctctagagagctagagtcacgggcatgtgccacacactcgattttacacagtgctggagagccagggtcagggctccttagccacgagggaagcactctatcaaccaagctacacccagcctgtattacaagattcttttttttttttttcacgaagaaaaaaaaataatctttttgaagaaggtgttacatttcacataagaaaaaaaaaggagtgtaggggaagctgtagccacgccttcttaggggctggctacaagagtacctgagggcttgtgagggcgtggtcagagtgagtagggggactgcgttttcggttttggtttctctttgcttcttgctgtacagactaccaccggctggctggttcgctctgtaagtaaggcttttccctattaaatacccttatatttctacctgactccgtattggtaatttcttactatatctggtgtcagaagcgggatattggaaacccacaccccatttgggacaggctgtgggttccatcgggcccgctgcctaggcccggaaagcacccactctccacaggcgttcccggctagcagccgacccactgctgctgagctgctcagaaccacccacccagctcagagacagtttctagctgcctagagtccaggtaggcctccgctttcagctgtggcttcccctggcctgcgggaaagcccgaatctgtttcagtggttgtagccacaaggccgtatactctctaagataagcgctgaccgactgctgccaaacgcctcggaataactgataccaagaggctagaggttactactactatgaaccagaaccttgggtaggaagagccttcccctggagaccacgaaggctccaggaacctagatgtttcaactgtggtaaaatgggacatactaagagaaattgtagacaaatgaattctaacaatgcctcatatggaaggccactgccttctggattgtgtagaagatgtggtaagggcagacactggaccaatgaatgtagatcgaccagggacatacaaggaaaccccttaaggtcgggaaaccccgaggggggcctcaagaaggcccccacatcgagaaaggtcaggtcatttccaatagcagtggaagacaatctctcacaggaacaatagacagttctttgcatattgtgaaaaaagatattgctctagatggtagtttgaatagtgatgaagaatcaagtgtgaatggacaaaatgagaaacacatattttggcaagcttctattaatgataaaaggcctcagttaaaagttaaaattaataataaagttatttctggcttagtggacactggggcggatgtaactattattactcaaaagtcttggcctcagaaatggcctcttagagaggcaaatgtacaatttttaggaattggaactctatctagagttcgacagagtgttaactcagtggtctgcattggaccggaaggacagaaagggatactgaaaccatacgtggcagatatagctataaatctctggggtcgtgatctcttacagcaatggaatactcagattaatattcctccagtgtcagatacaaattatgaaaaagatctggtaagacgctatggaaaacggttaccaaccatccatgctgtacagaaactaggtacaaatgatggaccttcagaggagccaaaggccctgccattgaagtggcttacagatgaaccagtttgggtaggacaatggcctatgacctctgagaagctagaggctttagaaaagttagtacaggaacagctagatgctggacacatagaggaatctaccagtccttggaattctcctgtctttgtcatcaaaaagaagtcaggtaagtggagaatgctgacagacctgagagctataaataaggtaattcaaccaatgggctctctgcaacctggaatgccattaccttccttaatacctaaaggatggcctatcatagtcattgatctaaaagactgttttttcacaataccgttacaggaaaatgatagagaaaaatttgcatttactgtaccaactcttaataattcacggccagttaggagatatcaatggagggttttgccacaaggaatgctaaatagccctactttgtgtcaacactttgtacagcaacctttgggaataattcggaagaaattttcacaatcccttgtttatcattacatggatgatattcttttatcagattctaataaggaaactttggaacgtatgtttgaaatggtgaaggaagttctgcctcgttggggattacagattgcaccagaaaagatacaaagaggaaattctattaactatttaggttacaagatagacttacagagaatcagacctcaaaaggtacaaattaggagagatcggtatcaaactcttaattctcttcagaaattattaggggaaatttctcaattacagacaattattggtgtagaaggacatgacttaaagcatttaaaaatggcccttaaaggtgataaggacctaaacagtcctagaatattatctgatgaggcagaaaaagagttacaatgggtagaaaacagaatattgaatgcacatgtagatcggataaaccttaatttagactgtattctggttatcttgccatccagagaatacccttctggaattctgatgcagagggaagacactatattggaatggatatttctgccacataaacagaataaaaggttaaagacatatatagaaaagatttctgatttgattttaaagggaaaattaagacttcgtcaactgactggaaaagatccagcagaaattatagtacctttaactaatgaagaaatttcttccttatggaaagataatgaatattggcaaatagctcttactgactttttgggaacaattagcaacaactatcccaaaactgacagaattaaattcataaaaaagacagtctggattcttccacgtattgtaagacaaactcccatttctggagttcttaccttctacactgatgccaacaaatcaggtaaggcaggttataaagcaggtgaggtaagtaaagtagttcaaagtccatatacatctgtacagaaggcagaattatatgcaattctcatggtacttaaggattttacagaacctcttaatatagttactgattctcagtatgcagagagagtcgtgttacatattgagactgcagaatttgttcctgataatacagaattaacttctctgtttttacaattacaggaaactatcagaaacagaagtaatcctatgtatattacacatatcagatcccatacgggtctgcctggcccactagcacaaggcaatgatgagattgatcgtttattaattggaagtgtgctagaagcctcagaatttcataagaaacatcatgtaaatagcaaaggtttgaaaaaggacttctctatcacttggcaacaagccaaggagatagtgaaaaactgtcctacttgttccttttataatcaaactccattgccagcaggttgtaatcctaagggcatttggagaaatgaggtttggcagatggatgtctttcactttgcagagtttggaaatttgaaatatgtgcatcataccatagacacattctcagggttccaatgggctactgctcttaactctgaaaaagctgattctgttattatacacctgctagaggtgatggcagttatgggtatacctgcacaaataaaaactgacaatgctccagcatatgtctctacgaaattggaacaatttttcaaatattataacataaagcatgttactggtataccacacaatcctacaggacaagcagtggttgagcgatctaatagaacacttaaggagatgctcaacaaacaagcttggaagactaaaccccccaaacataggttgcataatgctttattaacactaaactttcttaatgccaatgaaaaaggacaaacagctgcagaaagacactggactacggaaaaaactgctgaactcaatcagccagtatacttcaaagatgtactaacctctgcatggaaaccaggacatgtattacgttggggtaggggttttgcattggtttctacaggagaagaaacactttggataccatcaaagttgatcaagattcgactggaaaaggaaaaacctctcgacaaggacaaatgacaggtattctactaaggtatatcttataaactaaatagaagcctcccaaaggaaagggaagtgttttgcttttatcttcacaggaaaactcatcttcagaaggcaaaagacactgcatgggtagatacttaagaagaaaaggtagctataaccatcaaatagaaggaatgtgccatacggtaaactttacagctgtctctcaaaaaactctatttctctttatttcctagtccctattcaattaaaccaatgctggacttagaggtggatttggctttcctcctctaaaatccaagcacattatttaactaagctttagtgtttctgtattgtatcaagaagccaattgatgtaatacagaataaaagaagaatttggggactgtctttgtcttttcttggatctttctctcaaggtgtacaccctttcataattgttatgctctcatggttgcattcccagcatgtgtacatacacaagcaaacatttctctgctaactgtttatgtttgagtcccacacagccaatgaagacctgcctgacagcaatccctggacaccctggaaagaaaatgggccacatctcctcgactgcactggatccaacttgctccatttcagctgacactccggccagaggttcgggtactgacttcaatcaagttgaggatttcaagcgagatcttcaatcaagtgaatcccatctaacatggactggatactaacattttctttctacaggaccccacatgactatcatcgtcccatttcagcaggaagtaacttggaaaatgctacgccccctttccccattgttgtcacttaggatagtgtatatacctagttaggaatagcttcctattgtttatgactttagggtttagttaaaatagatagttatcttcttatattttacctttatactgttaagttttaatcctcttttagactaaaaggggaattgtaggggaagctgtagccacgccttcttaggggctggctacaagagtacctgagggcttgtgagggcgtggtcagagtgagtagggggactgcgttttcggtttcggtttctctttgcttcttgctgtacagactaccaccggctggctggttcgctctgtaagtaaggcttttccctattaaatacccttatatttctacctgactccgtattggtaatttcttactataaaggagcgcttttttttttttttttttttttttttttaagaaaagcaaattcttaaaatctgctaagagatccgggtgttggtggcgcacacctttagtcccagcactcaggaggcagaggcaggcggatctctgtgagtttgaggccagcctggtctacaagagctagttccaggacagcctccaaagccacagggaaaccctgtctcgaaaaaccaaaaaaaaaaaaaaaaaaaaagaaaatctgctaagagatagcaaatgcattgtagtcaggtagcaattcgttgtcattcagcataaaatttgagaggaggtagaagccatttaccaaaggatggcccaggctattctgtcacaccccagaagctgcacccctcatcgctgtcttgctaggccatcacccgatcttctcacacaaagtttggtctccaggaacttcagactcagagagcagtccaggatggggaggttctccagggaccaaaaaagatggtgcctcatttacaaactaaacttgcagtctggtttacagtacatatgtgactgctacccccaccccgtgagagtcaaaccctaaagcagcaaggcccagccccagctctgttactaacaggctatgggcaccaaaggagatgtccacacagccactgctaaggtagcaacgctataacagtgtatagaatcgaaacatagaacactgggaacttagttcaatggcagagtacttgataagtaagtgaaaggtcctgtgttcagtaaccagcactagaaaaaggaaaaactgaaaaaaaaaagacataaaatcaacagaatgtctccagatgctctgtgaacatgatacagactcatatctaaaaataacctgtctcttttaaagtatcagcaaaaatatataatctctgaaatacagtgaactgctgtactacacaaacatgatacaatgactggggcaaattttttaaatgcctggaaaacaagactaggatttgctagaatcttaaatgacgacccttgcatgtaaggagaggctcgtgttgcagagccatgaatgcagagtgctgctgaactgctggctcaacctcggggtctcacaggctgtggcacgctcagagggctgcctaccatttttgttttccattacatttgaaatgaatgggctactttagcaaaaatagtatacaactttttaaaacttacacatttcaccatgcatggtgacacacacctctagcacaaaattcaggaggcagagacaggatgttgagttaggccaacctaggctacttaatacattgcaggccagcctgaactataaagtaagactcaaacaaacccaaaccctaaaatttggaaataatctcatttgcatttctaaaatcacgggaaatcaagtaaaccagacatgtgtcaaagctcagcttgaagtcagggaggaagctagatattgatctagaaatcatggcttacctgtgttctcacagaaatcagaaatagcagtatttttcagttcaaccctacatagaggttaaaattaagaaaaatatctttccatttcctaaattggttttcacatgactgctctcctcaaactctggcagaatacagccaagtagctccactcttgtatggtgttgactactggcacactatccagctcctcatacgaaatgccttctgagaggtggggaccatgatacggtctcccaacgagagcctgctgtacaagaacaaaccatagctatactacgagattttttaaagacatcctctgaggagtgtggaacgagagagacacactcaccaagccccagccctctttgttgagcgttgaccctggggattcttctggtgtgcccatgggggtaagagcagagaaagtcctgaaacaaaaagaaatccaggacacactctgcactgagagtcactgtcctgagtgggtctgaccagaaactgctatgacccccagtggtgtcacatcacctctccatgtcattctctaatcaagtctcagaggcccagggatggaggtggccctaacgtcctcagattacagatttttaaagagtgatatgcagacatcatggctgacagagaatagcccacgcccacccaaaagtacactttaaaggaaaaacctgcaaccatgaaaaatgcaaaggcttaagttgtcaatataaccccaccccggcagagtaacacagagggagggagactgtgaaaggacagggacactgcgtgctcttgcagatgctagctcctgagcgtggcttggtgtggggagctgggggtacagtggatggccagtgtgtgctctagagagccactcagaatacccatggagaggcgctcaattctctatggctaatctgtggaaaatccacagaaaggtagcaaaaaggtgtaccagttattcacaatctacctcaagtgaccacttgggacctcttgtgaggtttggccctaaggatttttctagtcagatgggcgattttttgcctgttatcaaatatgaacagggcacaagtcccctgtgccccttgtcctgtccctctcagtcacccccttagtgtgcatagtccctcggggtatgacaggggcctctggtggagacctctggcagtgctgggattcgtcccaattgtaatactgtccttcacccttcctagagctgctccgtgagcccatgtgtaaacagtagcatgcagctcggtccccttactctccagcaggtgactccaggcagtgcattgcctttgactgatgggtgtccatgttcttggtgtctgtggtcaaaagaaaaaacaatgggaagcagttgccccatttgtcagtcagctttacattactcaaactgaggaaaaacacaaccacacagtctgatttcactggcttttaattttttttcactgctagctttagaagctacattgttaagccatgacaaacacctctgacttgggcctcgggtcacagttacagtcacagttacgtaagttgttttacaagaacttggcagtagtacaaactggtagaaactagctatccttgacttgggttgtccaggtgcctggaggtcaccttctgacatcacaagtccaaaacctacaccctcagagcccagtaacaccaccattttctctaggtgcaccatcgggaagagctgtgaagtttaattgcaaacatgcagaccaccaacacatatgtaaatttccccctttttcttttgtcaaggttagccaggactaacctcgaacatgcttctccaccaaaagtggcatctctcacttcctgctgaccctactggatctgggcaataacccagacccacctggcctcagctcagcttcttcatggcacagaccacttgttaaacttgctgcgttttacatgtgtgtctgtacatgtccacacacacatttgctcttacctttccctcctctccccctgggagcaatggcccattagagaggaactcctgcttcgatatgtagctctatggccgtcaagtagctccgctgccagtcaataaatatttgttgagcaaactaatgaaatctctcctcccacttacagtattgtctgtccagcatctactttcagcttttaggtggactatgaactcaaaattacaatattatcggctggtgataactaaaaaaaaaaaaagattagaatcacctgaaatagaggtggcttcattttagtctgccacccgaatgttctggattccagtgcatgtgtggagggaggggacacagttcatacagtccttcaagggagcaaaaaactctgaagtttttccagttgtgtcatgttctgagcagagtcacaggggggtcttgggatttgccccttgcctctcactggtgccaggacagcactactctggatattctttctttctttctttctttctttctttctttctttctttctttctctctctctctctctctctctctctttctttctttctttctttctttcttcctttcctttttgtttgggggggtctctgtatgtcctggaacttgctatgctaacctagctggccttgaactcacagagatcctcctgcctctgccttcccagtgctggaattaaagaaatgggccaccaaccctggcttactcctgaattttgaagctctttctctatcccttctgcaagaaacaacagcagaaacatctgtgatgaccacaggggaatgttgcattgtaatgtgtccaccgccagacagcatctgtgtggacagactcacagacttggctgcagaaaaaagaaaggccaaccaggaaagggaaggtggaaaatatgggcataaacctcacaagtcttgtgttttgttttggaccttaaacaatccaccaagtgtattttgtactgaggcaggcaccaatgggcaccgcaccacacttgtacttgaaggttaatttgtttgttcagtaagtcaaggttggcaggcagccgaggttcacaagcctgttgtttactttctgttggctgagacttcagccagtaacacaaaagtatccgtataattagtacgcactcctttctgcggtctgcaggaagttttgaaattcttttcgagaactcatcctcaactctaaaatgtttttagtgcactttaaacacagagagaatcaaaatgtgtgtgatatcaaggccgagcctagggcctgcggagctcgggaaacagagcgccgacctgaagaccccagagctcatcacaccctctgtcccgaggacaccctaaccctgacctggctgctaaccactacctggaatttcttttgaactatggacctttgtgtgagtctctagaaaacatcattgagcgctgaaaagcggagcgtgaagcatgggtctgactaggtaagaaagggtgcaaggtcccggcagagtggctgagcgagcactgccagggttcaagtcctgctgcatccgagcctctcccaagggctcagaccgtctgacggacgtgctgtgaaccgggtgctggagaaatcttgtcagaggacaaaaccgccttgggttttcttagtcaccgctgagccgctgaaacaattgctggaaggaacgtcagtgccttcaggtgctttgagaagcagggtgtgttgtgtgccgggcgcacatgggcgttttgctcctaagcatcgaggcaggcggtggcttgatggccatgactttgagcaagcctgtgctgtgagttggggccttctgcgctggcgcacccacttttttatgggtagtacagctgtgtcccttgagttgccccatccctctgggacactctctccttttccctctgtacacttcctcatctagaaggaacacacccttctctcgtggtttcttgaggtgaggaggagggacgcagacagataccgtgctgcctggaggcaccagctggggtccggctgctcagacaggctctcctcctccctgaggacccagaggaaaccgtcacagtggacagagtctcagaaaacgacgagattcaggaattgagtccgatgccgggctgtggccacgcacacctttaatcccatcacttgggaggctgaggcaggtggatttcagtgagtctgaggccagcctgatctgcagagtgagttccaggacagccagaactgttaggcagagaaaccctgtctcgaaaaacaacaaacaaacaaaacttaatgttggcacgggctgcacagtgggtgctgaaatgagaagcagtgcagtgcagattaaaggtctagagtcctcatccgctacctggacccctgccctccctgaaagcaacatcaaagccatgcaggatactggaatttgagcactaagaatgctgcgaggccaagcagcaacagttctacgtccctgcccacccctctcagccctctgctgttccctcactgtcctgatactgcattctgagtgtccccatagggtgtgagaggcatcggagccacaccctgtgtgcctggtcaggctgcaggctgcaggctgcagactgggggggagggggggcgggagtggatcctgcagagcagggagacagcaaagcagaagcaatgtgagactgggcttaagttccccccaccccctgtgtggacatctctagtgtgtgctcctggggaggtcactgtctgtgtcctggagtatagttctcatctttaaacctgaagagtggggtctcaggagtcctgagttacggaatcagtctttatttgttatttttccataaaatgaaaatgccctaatgagttagtaatcatatacttacaggtacacttctgaggataaattaacagcaaagaatttcatactcagtttctcttgggattgtaattttggcacatatgccgaactgttgcccaaggcttcctcatagcatggccagatcagagagagcttttgtcaactgataagttaaaaaggcaccttagttgctgacctcaccagtagcttgttttctcttatctgctcacaagctcattcccgtttctctgttctcattctgatttgttttaacttttgagacaggaactttgtagccctggatgatctacatctcactaagtagaccagtctaacctttaacttacacagatcctcctgtctctgcctctggagttctgggagtaaaggtgtgcaccaccatgactggttctcgtctccattttcctggttaagttgttatttttcttatcagtgtctagctctttgtaatgtgaataactctttcttctagcttgccatttgtcctttggttaatattgttgtgattttgtttttgtttgtttgcttttcaagacagggtttctctgtgtagctctggctgtcagaaaccaaaccttaagcttggctttctcagtctgtagacccatgagaaatgcgttcttgtttcttggaagccagctggtataggatgctattatctatagccaataagacagatggggacagagtaaatatgccactcagaacagaaagggtatccttttcatatacctgtctcaaaaacaaaaacaaacaaacaaaccaacggaatctgttattcagatgtgcatagtatcttaattactatagaaaaactagagctgattggacacggttgggagtgtatgtagctcaggtcattgcaaatgtgatgttacaggattttggcatccacaactttcatctgtgaggccctggaaccagttccccaaatgatgaggagtcgctatagtttgaaatgtatcatagatttaaaactaaaagttcgaactattctacttctacagaaaacaacaacacacacacacataatgctggattaaaatttttgcaagtttctttttttaaaatgtattatttattattttgtggggatgggagtgtgccccaatgtgcatgtgggaatgtcaccagacaactttgtacttctgtgtggtttctagggacggaactcaggttatcagctgctgtggcaagcactttttcctgataagccatctcactgtccccggaacaggcagagtttctttaagacaaaaaccacaagaaataaacagtagatggatctttatctaacagagaaactcttggaaaggagcctctaatgtgtacaaaatgataaactccagattaggagaaacagcctcactatgaatagctagctggcagaagatatcagcctgtgccaactaagagcttgtccttcaacttggtaaggagacaaatggtgcagaattcttaagagcaaagcatgaagacagaaaacacatccagatgaccaataaagaaatagaaacacatcccaagcttgtgctggctaattttatgccaatgtgacacacactagggtcatctgagaggagggagcctcagctgagaaaatacctccataaggtcgggatgtagtcaagccagtaaggtactttcttaattagtgtctcctgggagaaggtccagcccattgagagcagggccacccctgggttggtggtcctggatactataagaaagctggtcaaataatattctaataaaactgataaaaatcctgagactgagagtagtcgatagtggcacatgcctttttgtttgtttgtttgtttgttttgttttgttttttgtttttttgagacagggtttctctgtgtagctttggagcatcctagcactcactgtagaccaggcaggcttcgaactcacagagatccacctgcctcctgagtgctaggattaaaggtgtgtgccaccaaagcccagcttcatacacctgatttttttttatatatttagacaattttttaaagacttatttatttattatgcatacagtgttctgccggcatgccagaagagggaatcggatctcattatagatggctgtgagccaccatgtggttgctgggacttgaactcaggacctctggaagagctgccaatgctcttaacctctgagccacctctccagccccacacacctgatttttgaaaataagatatttaaattttgtctacttgtgtgtcacctatgtcaaaaagaagttccatgtagtgtataatacaagaagttcagataatggaatcttttaaacacacgtataagatcaattagtttttattttatgtgactgtgtgtgtgtgtgtgtgtgtgtgtgtgtgcgcgcgtgcacacacgcaagcgcgctcgtaagcgcacgcgagagcgtgtacacattatgagtgtgcctggtacatgtggaggccagagaggatttcagactccttggaactggagttacagacaattgtgaaccaccatgtgggtgctgggatggaactaaagtctcctggaagagcagcatgtactcttaaccactgagtcatctctttggccctagataatcaaatctcaaaattaaccaaaaacaaagtaaaaaaaaaaaaaaaacaataacttcacaatgaagctaagtatatattgctaaatctgaaaacaaaacaaaattcagttctaatattcatggaagccaaaggggggtgggaatggaaaatgaatacaaatacagatgggaactttttagaaatttactgaatgaaaagagatcagcacacaggggctgcagagaagggaggaggtactgtggagcacagacaccataacttgcaactggagggaactacggctccaggagccatgtggaacaggctctgtgtggcatgactagaatacagcaacatcaaacaaatgtgtgttgacaacacacacccaacagtaaaatcagaaacgctgtcaaatgtgagggatggcacaggctggtgaaatagccccaaatcaccactagaaaaggctcaccgtccacaccaaaagtggttttaaatgcccagagtgacagactaaaactgagagatccttgagagatttagacctagtccattcccacgcatcagtcttggcatttcttgtctcacagcacagagggaagactctggaggcaaatcagagaggtacgcatccctgtaatatgatgaacattttttatgcattcttagatattccaaagccccagaaataagccaaatggtttttatttggttctatatatttatatatttttgtgtggccctgcaaagggccttttgcagatgctgggcacaaaaccccagctgcaacgcagctgccaaagcctagagtatacacctctggtgcttgagggaatagacctcgtccatggccttgaccatccctgatgatccaagtgactgtctagcacttggcatgctcaggctggactttgtggtggtgtgcccttgctccaacctgacatggtgaatacaagaggaaatttcactaaaccaactggcattttcagtcatcctgtatttaaacaaccaaaaaggcaagcatgacagtacctgtaatcccagcattcaagaggctgaggaagactgtaaattctaggccagttaggcaaccatagtgaccttgtctcaaaaaaaagaaatcaagaatcacacacacacacacacacacacacacacacacacacacacacaaacacacagcggatatggacacacaaataaataaaaacaaataattaaaacattcttttactacagagtcaggcagtagtggtacacgactttactggggaggcagaggcaggtggatctctgagttcgaggccagcctgttctacagagagagttccaggacagccaggactacacagagaattcctgtctcagaaaataaacagataaacaaataaacaattatttcattacaaagaaaattccttaaaccaatgtctcaatcttgacagtttcctttgaacactcattttctatcatatttgaaccacaaatgactaatggctccattaattttcttttttgagtggggattagacctggggactcctgcgtgggaatctaacagagatttctgttttcacttaaaacatttttaacctttagagcaaggagatggaagggggaattggtacagtgggaagcaagcagcctttcttacctgcacatgcaaagtttaacatgaaaccaccattcagcagagagaagccagcacattgcaatattttcacttggcaagggctatgctagagtgctgacattactatatatacatatatgtatattgtatataaacatatgctacgtttatacattacacaatagcaaaagtaaacttgcacaaaaagccacttagggctccaagttggaaaggggaaaatacaaagcccccaaggcctttgatgtacttgacctaattgttgaggctgagtggaaatatgaaaataagcctttgtttagataattatttcataatcagtctgagttagcacagccctctaagctcaccgaaagtcactggtactgactgggttctgccacatggtcgctttaacttggtggctaaaacccctttgaagcagaaagtaaatatggcacatggtgtcataatgagacctgctattttgtaaggtcactaaaagtttaattacaaagcaattactacccacaataaagactatttgaacactaaagacaagggtttaaaaattatgtacaatacaatcattatcaatattttcctccagctatttttcctaggacaattctttcatttagaagtaaacactctcagggaaccatgaaatgcaagtcacttttcactcctgctgtataaacaacacttacagtacataagcacccttccttccgtaccaggacaaggtcacctgatactgccactaggaattaaaccaggagggtccatagcaccacttaagctgtggcggttttactgaaatcaatcagactttttatacctttatcagaaacagaatataaggcaattgcctggatcagtacagttgtagttaccaggatacaacctatacggggttcgtaagactaatgtctaagaccaattgcccagtccagttccatgcctcctcgacttctaagggaacatacagagaaacacaaagtggcctgaccacttcactgcctgagggaatgccttggtctctcagaactggaaggcacattgtgccccagaggtcatggactctcacctttgaaagacctctgacaaatgcctcccaaggcagctaggccaggccaactccacggttccctgcgatagtacctacattttattgactgtgtaatctacttggggaagccgggctgaggtggcgcacgcctttagtcccagcactcgggaggcagaggcagcagatctctgtgagtttgagaccagcctggtctacaagagcaagtgccaggacagcctccaaagccacagagaaacactgccttgaaacccctcccctaaaaaaaaagaatctactaaaacttatcacacattcagtgaatgttacacttctctggagatggtagtctgctccaaaggatgcagtgtagtcctaggctctggttgaggacctcaagttaagtcaatattaatggacgggctggggctgtagccttggagctaggtcaattgcctctcattcgggaatccccaggtttaataccagtaaacaaacaatgaggccattagtcatatttcaaaaattcatatcatagaaaatgagtatttaaattgaaacactgactcactaataatgcacagagcttacattttaaccactaacctatagcattaagaatcacattattttccctaatattaaatctaacatgggtgcagatcccactaactgatacaggtggcaaaggcagggtcttttcagatgtgatgacaatgacatgcaacccaaaacatgcattatcagtacatctagtctctttataaacagacacctccttcacggcccccagacctgcctgtcactaagtgaaaagcatggaaggctataaactaccctcttagcacattttctgccaacgaagatcatgttaatcaaagtccagtacggttcgactcccaattagggggtgaaggttgttcacatggcctctccccagggactctggtccctgagtctccctgaggcattaacccacctccacccccactgagaagcatttcctttccttcagaggcaggatttctggcgggtgtgttacctgtccctcaggaatgcttgtgagacagaacatcaccattcacctcggagggacctaactttatgacctggccacatgaccttaaaacctacccagtatagtctcaagtggaggtcctgtaagaagataacagttttgaggcagtccccagtaagaatggaaaattactggctatgtatgtttctgctcaagcacttgattcttggtttaggtccatatcactaggcagcatgccttgcttccttggctgtggagagcccttatgattcggcctggctgacggagagaaccagctgtctcctctcaccagagctggagttagagactgacaccacgaggcctggctttgatgtgggggttagcatttcaagcccaggtcctcatgcttacgaagcaagtactttaccctctgaaccacctccctacccacacatcccagattctttttcttttctcccttcccgaggctctccctatgtagccccgtctgtgtgtcctgaaactggctacgtagataaagcagctgcttgtgacctatctcacccctgcctctaagaggcatgaaaggcttcaccaccacctgcagccacatcacagattcttaatgaagagaaatggctgctgaatcagagtagaaccgactcccacaccagtcttgtaggacgccaaggatttcagggaagggatatgaatatgaaaagcagacaccagtcatgggaaacagaaaggcaagccactgatgcttgtgagtttgaataaagtggtgtacagtctaagaaaaaaaaaaatcactcctgccactgagaacaaaaccaccagagctgaaaaaaacacatctcaactcccagctgggacacagacatcgtgagcagcacgcagcttggatgcaaagttgtctaggaagctgagtgaagactgagcccagcctgcagagaagcagagggacctgctccactctgaaagccccaagtgccctgggcccaatatgttatctcttaatccttcatttaactcaaccttggctttggagccaattcccatcggctcatcatatcagatgctacaaatgacaaagatcggaacagttccagaatttcaacactgattgcaagtatcactgcactcagaacacattctcaggagctggtgtggcagggaaaaaatgcttatcacttagatgatagtttcaagagtgtttgcttattgtccttactggtgatttacatatataccacattttatagaattatgacattataaattagttactttaagaagaatcatgcacacacattgttacagaggtgacccctcagtttatagctaagtgagtctttattccagccagctgggactacaatcaggtatttgggacccatgtgcagcagtgagcgtttaaggtaaaggttttttaaaggcaaaaacacatcttggtatatggctcagcagtttcagggatcttgctcaaacaagcagattaataaacatcaatcaagataaactagcttgggcatcttgaacttatgttcctagcatagagttgggtaattttccatgggattctctatcaaggagatcaaaatagttagacctaaactggcctcaacaagaatacaagatgtaggaacctctgccctgccttgccctgacacaccattaagtttgtcttagtgtgaaatgtcagtccagaagggagctggtagcatggggctccatagacggctgggcactgtgagttaaagatgccactttgcaggccaggaagtagtggtggcgcacgcctttaatctcagcacgtgggaggcagaggcaggtagatctctgattttgaggccagcctggtctacaaagctagctctaggacagccagggccacacaaagaaacccagtctccaaaaaccacatgaaaaaagcacatgacccaaataagagaaaaaaaggcaaaaggaagacagagatgccagaggctcgtcctgctcttagttcacttgtgaacctgagagaagcattgagacattttagcaaaagcttatctatctatctatctatctatctatctattatctatttattttcttcctttctggtttttcttttttttactctttatttgaaggtttttctttttttcgggggtggggtgggcagagtctcactatgtaggccaggctgaccttgaactcacagcaatccacctgccttagcccctgaagcactgagattacagttactctgggtcaagatggtcattcatcttcccaggatctcctgagagatcatttctctgaccttccctaacactgatttatttatttttgctggggtggtggtggggtgaggaggctagttgagacagtgtttcaccatgtaaccctgtctgttttgaaactcactctgcagatcaggctggctcccactggctcatgccatggggcttcctactatagtgccataccaccctgaacccccctgatctcgtctgaatgtttgactgttaactagacacagcctagaatcatgtgggaagagaacctgagtgaggggttacttagactaagttggcctgtgtgcgtgtctgtgggggattgctccgatggttaactggtgtaggaagacccagctcactgtgagcagcagtgtcccctgggtagggagcgggtcttgaactatatagttcttaaactggaaggccttgccaacttgtcagaggttgcagtttaccatagcctggcagctttctcgaaacttggcaacatggaagactcccttctccaagaaaagcttcctgctctctacccgcctttttctggagaatgactctaagccagggatgcctgacttatctcaagggtgacccttgacacagttgcctgcaaagctcttccctgagagtaattagtaagtgttctagccatttgataagatggtgcgtgctcccactaatccagctatgtgacaggagtgtgctgcttaaagcaaattaggatcaatccccagtcccaagtatttgatatactctggaataaagttgagctgattcactgaagtctgtctcccagaggattgtctcctttgtacccacagctgtccaaaccccatttccctcttctgctccttccaccctcctgaatcaaagcagccactgatcctgaggaagaagagaggcacaaatacagcaagcaggcagcctgggtgcatttgttctctctgctcttgactgtgaatgtcatgtgactagctgcttccgtatctgccttgacatctctgaaatcaaggactctaacctgggcttgtaaactaaaacaaaccctccctggactggctaatcttatgacaacctcacaccagctagagtcattttggaaaagggaccctcaattgagaaaatgctcccactagactggcctatgaacaaaactgtggtatttttttttttttttaatgtgagagggcccagttcttttgggacagtgacacccctaggctggtggtcctgggttctataagaaaacaggctgagtaagctgtgaagagcaagccagtgagcagcattctgcatcagcttctgcctcccagttcctgccatgtttgagttcctgcctggcttccctcagtggaatgtaaatctaataaaccctttccaccccaagctgctttggtcatggtgcttcatcttagcgatagaagccctagttaggacactcaaccccctgacttcataggccattaaagaagcaagttatagcaaaaaaacagaaaaaggaattcagccaaatgtgtccacattgggaagaaaaacaaagagatctaatgacaagctcttaccccctcaccctcctcatcttttgtgtcctgacaggaagtttaggtttaaatagagggcaaaagtatgtttaactaagcaattctggtcaaggtgtggtctcggccattgctgaccaatcagtgcctgggctgcagcctgcctgcagaatgatctgatgagctgtcagaactgtgtgagaaccttcctggcaggccaattccttccctcactggtaccaacctcatgtttctcccagaataagcttcttggagaaattctaactccttgggggagattctgccagtaatctggtcactcatatgcctcctgagaatggctttggattagtcatcctgccagggtgaccagacgttttaatctacccagagtgtgtcaacacagccaattatagtggcatattgaaagttcgtagggctagggatgtgactcaggggaagagtgctcgtctagcacatatgagctcataaaatacggtattttagcgagtttgaaataatgctcaaaaatgcaacatttggaccttcttgcactaacttacttttcctccacaacatatttgaattaataaacgaaagtttcagataatgtgactacagacagaaaatccagtcaaaggaggctgtggacagaggagaagacagtctcctggaaagtggcggctgaggtgtgcactcccacttgtgtggggcaacccagaggcagtgggtggaaggatgtcaggcggcaattagtcattttattatccacccgtccacacaggttccttgctgctgtgaataacgaagcaataaactcggatgtgtaggagtctttggtggggtcagttctccaagtgcatgtgcacgggtggaacagctggccggatcacacggcagcttgatgtctagttttcttgagaaacccccacactggtgtcgacggctgcactagctcacattcccgcaccggaagcagtggctcccttctgatgtcctcacgggcatttggtggtgtccattttcttgagaacggcggtcattctgatcagggatgaaatggaatctcagccatcttattttgcatttccctaatggataagaaagattgagcactaaaaaaaaaaaaaaaaaaaaaaaaaaaaaacaaaaaaaaaacaaaactagggctggagagatggctcagaggttaagagcaccattttctctaccaggggtcctgagttcaattcccagcaaccacatggtggctcacaaccatccgtaatgagatctggtgccctcttctggtgtgcagatatacatggaagcagaatgttgtatacataataaataaataaaatcttttaagaaaacaaaaacaagcacggactggccttttgaactgcccctttgaactgccagttaatttcattagcccatctgctgatgggcagatttatttattcgtttgtttgttttggtgtgtaatttgtgcagttgtttatatattctggttatctgtcagctgcctggtgtagagctggcagacttcctcccgttctgcaggctgtctgttccctctgctgatagtgtcctttgccatacagacatgtttcactcatgtagcccatttgccgattctcgggactacttcctatgctgttaaatgtgtaggaagttctttctgttacacttttttttttttgctttatttgtatgggtttttttttttattctgcatgtatgtaaatgcactgtgtgcatgcctggtgcccatggagaccaagaagggacttggtcgctagagttatgaacactggggaactgccttgtgggtgccaggaaggaaaccaaggcacttagcaaaagcagcctgtgctcttaacctctgagtatctctccagatgttccctgatgtctttttttgttttttcagctgtgatccagagtctctctttatgtatccctggtggccctggaatttggtttgtaaggctgccttgacctcacagagatatgcctgcttctgtatctggcgcgctgagatgtgaggcttgcacctccgtgccttgcttctccatggctgcatctaaaatgtgctccctgtgtgtcctttagcagttttagcattgcatgtttaaattaaggtctttgatttatttaacagctgggtttggtgcaagttcacagttagggatccaattccattcttctatcggtacgtatccatttctgccaatgctgtttattgaatagtctgtcttttttcttcaagttagtcaaatattaggaggccatatctacatgggctcatttctggttctctgttctgtcctgttggtcttgatatctgtttttttgtgcctgtaccatgcatgccatctgttgtcactgtggctctttctagtttcaaagcctataccacacttacatatgtacacaaatatgaagactaaaagtgaggattggggagtctgccacacagcctgacacctaagtctggtctctggaactgtgatgggaggagagcactaatttcttgaaagttctctctggcctgcgcacacacactgctggatctctactgcccactgccaccaccactgacatgactgtcatggatgaaaatcagaccattccctgacgcctaagcatgagatttcccaagacacagatgtgacaaaccacacaccttggctgatacaagcgcctgctacctttttgcctgtcacagctttagcttggatctgtttttaatttaaaattaattaaatttaatttaaaacctgaaatgctgaagctgttaggtccttgtcacacggttagtaggatgtggaactgaagaatcacatccttggcttcaaggcaaggcctcttccttaaacctaccctgaatgcaatacaaaaagaaaggacaccgccccccagttctcttgagataatatctcctcagagagcttacacacaactcatctagcaagtgtgttcctggtgttaccagaatctgagggtgtgtgctggagccttagtgactaggcccctctaggaattttcatggaaggagtaaggataacacccatgagccttgaggccagggagaaactgtctccacacacatatttgtttcatcttttctataaaataggacacaggagtggcaagttggagacaaacagagactttctcccctagcattgcccaggctgtgactaaggtcaagtttccatctctgtgtgcattgtgttgtttccatgaatgcagatgagcacaggatccagagtcagaggtctcggcaaagagtgctccagaaagttgggggtggaaattatggaagaaaaatcaactggaggagagctatgtgtttcaaattctgttgtcatggtgatggtggtggtggggtgcgctttggggtacttaaggctttggggggattcctagggcttacatgagacagtggatgggaaattcccttgctggggggtactttccagtgagtttcttctttctttgaaagtcacctagctggttgtgatggtgcactctaataggatttgctgaaggaggtggaggcaggagttcaaggccagcctgggttatatatttaaagggctagagagaggactcattggttaagagcactggcttttcttccagtggtcttgagttcagttcccagcaaccttatggtggctcagaatcatctatagcaggatctgatgtccccttctggcattaaagcatattgcacagagagtatttgtacagagagagagagagagagagagagagagagagagagagagaaagagagagagagagagagtcttctggacctgggaccttatcatcatcatcattattaaataattttcattcaatacagtctggcctcagactcactgtgtagctgaggctgaccttgaactcctgaagctcctgtctctacttctagaggactggggttataggtgtgtgctcccacacttagtctctcaaacatgtatggtcatgtatgttacttttcctcaagtcattcacctgaactcgggcaaggcagaggccttttgtaagtatttaaataccaggtgaaagggatgagtccttgcctgttatagggacagaaaggacaagggggacaggggaaaggatgtttctggctggtagcagaaaggtagcctgtactccccatccagggtgagcactgctaatactttgacagtttttcttgatgtttttcttcctgaagttgaaatctctaggctgagactcattcactttcgttcattccctcctcaggagttaactaaagtgcctgcagcttattttctaatattcactttcttacttatctagaatcaagctcctgataaaacacaaacagggtggagacttagttcacaggttaagtaagaacacttacctatcgtgcacaaggccccgggttccacccccaggaacaccaaataaaaacaaaagataaaagccacctccttacaggtaaggactgtgtcttgtgtgcctttgccttggtctcctcacaatgtgcataaaatcaagaaattgtttagtttataataaatatcagaggtcctgccccctccaaacaaaatgctctttgattcactaaaaagtcacttgttttaggtaactcttctgttattttattttcctcgtgattttgtccttgaggtacatacgttgagctttcactcctcagactaaggcctagaaggatttggccagcagcacacgaagaaagtataatgttgctccagggtatgagccgcagtggactggaagaatgggtttgtcactcttcagaccaacgtgtctggctagagtatcgcatgcctctcatctgacacaggaggaaccggacagtgctctaagctcctgttagcccatggcatcacaacgggcaagggtaaaagcatcacgtcacatgacaacaagaaacactggctttgtgccggcgtgctgacttgcacagcccgcatgtaaacacgtgcacatcacccagtttaagtggaagaccgttgtcatcttccctagggacagagatgaggacagatgatgtcacaatgcatttgccatccaacttgcttgacagggaaactggaacaaacaagtaaagccttgttctcacccatgccatgtgggggatttgggaggacagtgtattgagaacaggatgtgcccaactctaaattactctatattatatataaaagaaatttaggctgcgtcttgccctaggagattccatttttcaaggtgtcttttacttcactttgaggaggaagaggaagactgcagtccctgggtagacccacaaatcacaccatctgtcatgtgccacccatgaaacacagaatgacaaattacttcctcttgggaccaaaaccagaaccaccccaaatttacaggaatcaacttgaaaggggtaaactaaactaaaaagcttctcttctaggaatgaagggaccagaccctcactcagcccctgctttagcagccacgacaggctacaaaaaagacatgtaggcctctgacacaaggaaactccagagcctagggtcaaaactgaacacaaagaaactccagacccccactagcctcctaggtacttggttcctgggaactatttggccacaaaagaaactccaggggagaccaaaacctcctctatagtctccaggatacagttctaaaaactattggtgtctgtgtacaacaggtcacctgcaagtaacaagacaaagccatagagatcacaaaacattccctctcagcactggccaatgagaatacctggtacacaggtatttcataccaaaatatgaagccgggcggtggtggctcacgcctttaatcccagcactcgggaggcagaggcaggcggatctctgtgagttcgagaccagcctggtctacgagagctagttctaggacagcctccaaagccacagagaaaccctgtctcaaaaaataacaacaacaaaaaaatatatggctttgagaaattttcctgattgttcccaaatgtcaaccaattagaaaccaacccgtacctactgatataatcctgtgacttttgtctttaaaacctagcagcagacagggaacttcactccctctggaggctgcttcgttagcttgctagacggggtccctccctcagtaggatacacaatttaataaaccttgtgcatttgcatcagtggtctgtctccctggtctctttgggaatccttatgactgaggcacaacaattaagatctcaggatgcatgggcgtgttcaaaccctatcaggagacccaggtccaagaagctatcagatgagtcagccaagaagtggctttctcgcctggaccccacaaaggggtggacacttagcactgtgatggcatggcccacaccagtctatcatctgatagtggaggtgtgtatcggaagcaagccagcagaggcctctccaactgtcaccagagctctggctcgtctaagtcccgactgttgatgtggcccatttgactgcattggaacctgaaacccactgattcctggtcttggacttcttgctcagcctgcctttcaacttgcggttgcactttctatctctgctctcaaaccctgactctagcagcagctcccaccccaccccaccctctgtactgtctggctcttttgttgttatttttaattgaaaataaagctatttcgccaggtgttggtggcacacgcctttaatcccagcactcgggaggcagaggcaggtggatctctatgagctcgagaccagtctgttctacaagagctagttccaatacagcctccaaagccacagagaaaccctgtctccaagaaacaacaacaacaacaacaaaaacaaaaacaaaaacaagctattttcatgcaatatattcttaccatggttccctcccgaatctccttcagatcctccccacctcccaacccttccaactccacacctcctgccttctttcctaagaaaataaacaggcaaataaaaagacaaacagacaaggataaaacaaaacaaattgacaaatcaagcaaagaaaaaagagaaagtgtaagaaatacacgctcgacacacacacacatacacctcataaaaactcaaaattggaaatgataaaactcaagcaaaagactggtaaagtgaaaaaaaaattacaaacaaagtaatatgagacaaaaaaagtctccaaaaacaccttttgcattgtgacggggcacgtacttctgtgtatgtttaccgtattggttgttgaataaagcactgttcggccaatgaggcagcaagttaggtgggactaagagtcaaggaggattctgggaaatgtagtaaagtcttgtgatcaggcaggaagtgacatagcaatcagactcagaatataaacaggaacaagcaggaagttgttctcttccttttcctcctcttctctgtggagccgccatgtgacaactgggaagacaagacacattccaccggcatcctcaatacgtttataaaatatatttattatattaatagttatgggtgatacttaagacagagctagcaaataagaaatcttagtcaattggccaacagcattgtacctaatataagtctctgtgtgttacttgagaccttaatgtggtggcgggcagaactcaggtggctggcggaaagatttaccattacagagttggctatttactatggggcttggggcctgcactccattatggcctatttagtctcaggttcttggccacctgagcagtgcatgtgttccaattcatggagagggtcataaatccaattagatagtggttactcacacatttatgccactcactatcacaccagcatagcaggcaggcaggtcaccattatagatcaaagggtttgtagcaaggttcctgtttacatttctgctctggtagcatgtagagtaccttccaataacatggatattatccagtaggagtgaaggctctaagtagacaccaactctacttctctatgttcaggaagttatgtaggtgctgtcttcagtcataggttctaaccgtcagtttgtggagagcaaccaatagccttggcaatcacttgaattatttgagggtttccatgggacccatttggccaacaactcatttagatgtaacccattgctggtactggaggcttcacttggcagcaatagatgtctagttggggcattgtctcccctgttatttggtgacttcatttgaacttctttcatatatgtacatatttaaagaaactttaccaggcagtgttggcacatgtccttaattccagcactctggaggcagaagcaggcagatctctgcgagttcaaggtcaacttggtctatagagctagttccaggacagccaaggctatacagagaaaccctgtgacacactcccaccaacaaaaccacacctcctaatagtaccactctctatgggcctatggggccaccctcattcaaaccactacagtgattcttagagaagaaagatagatcctgctttctaatccaatttgttaatctgtgtctctttattgggaaattgaaacaattgatgttgagagttatcaacgagcagtatttgtctttgttctgtctttgttgggtgagtgttcaattgcttggtttctgttgctctctctggatcttaggaaagtgtgttggccgtgggttgtccaacagggagtctctgccaggtgtagcactgggtgtcccagatagaaggtgttctaggtactaggactgacaagtagggctggaagagggtgaactgaaagagtccacaggaaggaggaaagctgggtctgcccaagattcagaggcatcctcagggagtggagtcagagagggaagacagtcccctctaagtggtctaccagtggtctggggctgagactggagcatttgcagtcgaggacaggaaggagagtgaagatcactggcctggttcccaggccagccagcatggccagtgggctcccaggtatagagtctctagccctttggcagtctattttctgtagagagttcaccttgacacaaaacttcctagtgttgctttgtgtgacctagacacgccctttcattttgccttccccccatttaatctcctctttgccaacccaatttacatgctggtttaagtcactcagatacttagggttcctcctacgttgtgaagaccatgttacaccacaaaagccactgaagccccatatctatcccaaggtccctccagaattaacttctttcctaagtctctggtgaacacagttcttgcagcatggtgaactgagtatcaaacagcacctgtcatgccacattcccttattagcgttttttttttttttcccgtttgccctatgctcactgtagtcaggtgtagggagaaaccctgattataggtatcgatgaccacgccctatcccacttctgacctcagatactgatgattacaaagtggagtcacagataggttgataaccggtagtttattgggggaaagcactcacgcaagggaactagtgatcaggtttgcacctgagcaggatgcacccagaaatgcttcccagtcatctcagccaagcgagagagcctcgtgctcacctacctccttcttaaacgcttgttacgtaactgtgacctaggtcagcaatacctataatcagggtttctccctacagtgagggttctctagagtaacagagcatacagaatgaatctctctatatacacagaaaggggatttattagaatgacttacaggctgtgatcgaactaatacaacaatggctgcctatgaacaaaacgttcaagaatccagtagttattcagtcctcaaaattgagtgtctcagctggtcttcagtatatgccagaatctgcaagaagtaggctctcatgtcagtgaagtaatgaactcattagcaaaagtgagaacaagtaggcaaagagaaagcaagcttccttttcccctccttatacaggcttccagaagaaggtgtggcccagaatagaggtgggtctgtctacctcaaaatgtccagattaaaggtgtgtctccccaccttaaagatcctgattagaggggctggagagatggctcagcggttaagagcactgcctgctcctccagaggacccagattcaattcccagcaaccacatggcagcttacaactgtctgtaactccagttccagtggatccaactccctcacaaaggatgcaggtcgaacaccaatgcatataaaaataaaaaaaaaaatttaatgatcctcattggaagtggatcttaccagttcaaattaagcaaaaatccctcacaggtgtgctgcccccatttttgggtgttagttaattccagatactattgaattgacacccaacaattaccatcacattcactatctgattcttttcatgggttgcaagttttggtatcccagcaggagctcttatgtgtactctcttcaattacatgctctagcacacagcaggatgacacctccagatcatttccatgtctgtctttcagccaaatcagaagctaatgatttgctatttcccgttgtgattcttatgttacacaagcagatatgttatcacccatagcagagaccacacaactgccaacaaagcttatctcatgcgttactttcaggaactacactgtattttgtagtccactgattcccaggagtccctgtactcacatggcagaccacattcagcaaggaggcaagtcaatccacactacatagtcaaagacagctgcactggaatttccctcatggatgttccatgtgattttccatctggtctaccagctcactgattaacaagtatcatgttgctagccaccacatcttataggcacactgtcccatagcacgtgggtaaagatgtctatatcaggatcctccaatggatgcaccacccttaggcagcttagcctcagtagcttatcttatcatcccttatggaggtagaaggaaaggaggataaacaggcagctttcacaggagttccagaccatggagaccattgtgttttactataacactgtatatacggtgaacctaaccttccgttaaaacatagcctatcttaaaaatgtgaaaaattacaacattgggggaattgaacaacttttgagtaattgaaggaataaatctgtagaatattacaacatatagaacacctagaaatactgtcatccatagtggcagactgtcatttatagaacattgtaaaccaacaaagcaaaatatatactgcttctatacacatgaaatattcaccaaaatgcactatattggtgcctacagaaaatttaatagctattaaataatttcctgcaaaccaacataatttaactagaaaccaataacataaaagtatttttcaggggctggagagatggctcagaggttaagagcaaaggatgctctcccagaggtcctaagttcaattcccagcaaccacatgttggctcacaaccatccattatgagatctggtgccctcttctggtgtgcagatatacatggaaacagaatgttatatacataataaataaataaaatcttttttttaaaagtatttttcaaaggctatggatctgggtgggtggggaggtggggaggatcggggaggagttgggggaggaaaaactgtaatcagaatacattgtctggaaaaaatctattttcatttaaacaagggggagagtacttttcaaagcccctaaatatttagaaataaaaagtgtatttattaatagaaaatctagaaaatttccactttataaaaaggaaataagacagaaaagtaggttacataataataaaattaaaattccagagtcataaccatttaagaggcaactacgtatatgatgagagggatctttatagcatcaattgtattagaaaaagaggactgggggtatgtagcctatgatctacttcaaagtaaattggtgctaccaggagcagacgtgtttcactgtcatgaaaaacctaatgttattaaaaacatcttaaatgtcatattctgtagatctctgaagtgtttgaagaccacctacttatctaaaatatatctctgtttaaccttgaaaatatacctaacatgaccacaagtttgattgttataagtgactaactactaacctgcatttcttaattatcctaacagtctgtaatatttcaaggactagaactacattacaaatgttaaaagacttgcataggtacaaaaccttaaacaagagtagaaatatatgttgtaacaaaataactttaaatttgtatcaatatacaaaaatccataccaatgtaagatatttgagattagtagttgtttttaatttaaaagtagattcaataatctacccttttatcctatcattcctatatatccccttttttcttttcattcccttatccttccttttcccccaacactggataagagagaaatgatagaggaaataaaaggaaggaaggaaggaaggaaggaagaaaggaaggaagggagggagggagggagggagggagggaggaaaatgaagagaagagaagagaagagaagagaagagaagagaagagaagagaagagaagagagaaacccctgtcaggacccataaagagggttccatttcatcttgcctcaagatcagagagttcaaaactacccttagacctgtaagtctatagctcagctgctgcaggatgtttctgcctcggtagcagatgtctttatctaaacaacagacttgggctcaggtatgtttactcttgaccctgaaggccagatggcaagtgtggctaccaaatacctggagaattaaggaaataagtctgtttaccctttatacgtgataatagaagtcttctgccattgtccccacttttggggtacttaagaatgtggaagaataagctcggggcattcagtattcactgcattgtcctcccgtcaatatcctgtgtctctgtcttttctcttaacgtctttaactagcctttctcaagccacactccccttctcaggtatgaaccatgggcaagtcagccggctctgactgcagcccggcaaagacagcttcccacaaatccctgaatctaatctcctttgcttactgtccttcctgaccatgaccaataacaacgtgcaaccaactcccctaaatgatgacaaacacacatactcaccaaacaaccaaaacccacccacccaacctctcaggaatgtaggttccatgctcttaaaattgcttcctgttgtctgtgggcaatggcatctttaggggaccctgagaaaattgggataagggtcaagttcttggagagctagctgtatcatttgattccagtctctgtgatgggaatgtgcagggcttacctgaagtcctggctggagcagtctgtgatgctggaccatcttagctagccactttaaagatgtcctgggcagtttgtagtctgaaaatgatctttgggtggtgtttgtcagcttagttgtattactacaattaagatagagttgttgttgcaagccccatcatcttcttggagacctcaaaggtcactgctaggaatggtcatggttcactgcagaaaaagtaaacattttaaacaccatattcagcagatctctgaaagaagagagtatcatggtctactaggtacatccagggtacacaaacttagttcttatatacctgcttcagccacaagcctgaaaacacatcaggaaactaaatgaagcctattttctagaatttagtattctatataaccactaacatcatgacgaaaagtttttagatagtatttatgtcttaagaaatgttttaaagagtcaaataagaaccaaaggattgtgagattagtgcaatgtaaaacagccccttatttttgttttcttctatcctataccaggtggctcttctgatatgagacagagattcttaggttttcctttaacaaatatgtatgggtttagagaaggagagagccatgctcaaaccccaaatccagcttgaatttttaattgaattgggaccacataaatatcatttgctacatatctctgtagagggcagcagagacaagcttttgggaagatttaggaaattctaccctgatggaggtgggctataccattaagccaatttactctttttctcaggacattgtctcttgatgatccatccttgttcttcagatgttcactggcccagtagtctctggattccttagtgggatgctcttattctcctggaaagataaaagcaaaactgtgccccaacactaactcggtggagggagagcccttttttggcaggtgatatcgaggcttctagcacatttactgttaatagctgatgaagttaatcattaccttgtgccagagggcattatatgcgatgggtggtttctatttctgattacttgatatagttgaatagtgaagctaaatctgaatcatccagaataagttcagtggtttcaatatgtaaaacaactttctgcatattgggagtcagtaactatattcagaggttctggaaaatctaataataccatgagaatggcatataattctgattttgaacagaatcataagggctttgagccattttacttatttttcctgacttatgacatgacttttctgatttatttacatcagtataaaatgtaggggcttaagaaattggtgtgccctttataatatgagggagaagtcaaatagttctttttataaactgaagtctcttgttttggggatactgttgctaatctctcccaaaaattactgaaagctcttcaccaatgttcattttctgccaataatgaggctatttctgcattagtgaaaagctacaatttttgctgaatctattcctgttaatttgcaaagtctcatttttcctttcagaatcaattcaaaaatcttttctacataagtctttaattttttttactctgtgtgctaaaaatctccattcaaaaaaattatcttctctctaagtaataattcctgagggagaatgagtagaaggtaaaataactaaattacaatcaagttttggatccaagtgatgcgtatcttgtaatttcttttctaccaaatccaggtctctctcagcctcatctgataattgcttggactatttaagtccttatcaccttgtaaggtttggaataaattacttaactcttgagtagctaatccaattgtgggttgtagccagctaatatctcccagaaatttttgaaaatcatttagagtttgtaattgatgtctcctgatttgtactttctgaggtttaactttttttgtaaacctatcttatatcccagataattaatagaattcctctttgtgttttttttttcaggagcaatttgtaactccaaacaaggcattctctttacttcatcaaagattttttttttcctaaggtacctgtatctgaatcagccaatcagatatcatccacataatggtaaatggtagattgatgaaactgtttacaaattatttctaatggctgttgtacaaaatatagacataaggtaggggtgtttatcaatccttatggaagaactttccattggtatcttataacaggttgagcattatcataagtaggcactgtgaaggcaaatttttctttatcctgatcttgaaaaggtatagtaaaaaaaacagtcttttaaatcaatcactataatagaccatcccttagataataaagaagtcaggaaaattccaggctgtaaggagcccactggctgaatcaccttatttatacctctcaaatctgttaacattctccattttccagatttctttttaataacgaatataggagaactctaaggactggtcaatgtttcaatatgttgagcatttagctgttcctggaccagatgttctagtgcctataatttttctaatgtcaaaggccattacccacacaggtttgtcagttaaccactctaaaggtagggttgttggtaccgttgaaaggccaacagttgttgtgccttgctcatgtacaacctgaacagtctgtgactgttcttgataatacattttttttttttggtttttcgagaaagggtttctctgtgtagctttggagcctatcctggcactcgctctggagaccaggctggcctagaactcacagagatccacctgcctctgcctcctgagtgctgggattaaaggcgtgcgccaccaatgcccggcatttgataatacatttttaatattttcctcagaaagatatgttagtttatgatttgtttctgagattggaggaatgttaatctgggttttccattgctgtaacaaatgatgtccccataaattcaatgctctgttagccacatatggctttaatttttctctctgtccttctgtccctatgcactcaacctatcttgcactttgtttttcctgagataaacttcaattccctagaggctgaacatttatcctgaagaggccaatctggatgccaaaattttggtgaaattattgtacatctacccctgtgtctaataatccttcaatttcaatgtcatttatttgtatttttagctctggtctctgattatttatagtagtttgcaaaacacttattttataatctttcctgaattttttgttttatctactgaagctgttctgtccttgataacatccagaacagtgttgtttttaacaacaggtattagtcatttaattgctctgtagatgcgtttctctaatgctaacagggaatgaaccaatttgatattgggtccccttaggacatttcccaatggcaaagggttgccatgcctgtcctttgtcgatctatgttcgttagtccaatgccagcctttgccatacctttttcatactcaagaaggctggggcctctgtttgaactatctctagaaaaaatgtttcctgtttctaggaacaggaacaccttacctacaatgccttttttaaacatttatttattatgtatacagtgttccatctgcatgtatgcctgaaggccagaagagggcaccggatctcattacagatgactgtgagccaccatgtggttgctgggaattgaactcaggacccctggaagagcagtcagtgctcttaacctctgagccatctctccagccccagactacaatgcctttttaaatgaccttatttaccacaattaaaacatctggcatttttattttgctggcattttatttttttatttatatcaaagtggaatcataattttgaaatcaagtatcagttgtattttggattcattcacccattggtgccaatcttacctttaaagcctaatcacccttttatattccaaattagtattttcaaaagccaaagattcaattaatagttgtctcacttctggatctgatactattctatttacagctgaagtctatctttgcaaaaaataaaatcatcaaaggcttctttggggccttgtataaatgactcagacctctttcctgattcctcaaccttgtcccaagcattcagaactgctaagtgacatagcaccaaggtgtgtcatcaaactcaagctgcctctatagctcagcatattgactttcacctagcaactggtcttgggaaataatgatatgaaataggaaatgaaataatggtattccctgtttcgtggccctagcaccctcccaccacgttcatcattataactgaggatcagctttaaatattgcttttgccaaatctttccagtctttggggataattctgttccgagttgttcatgaatttaacatctacttcacatagggtgaatgcataccatacaaaacaaccacttccttaaatctcctcaaatctaacatttctataggatgctgtgtaactgcctgataaccttggggatgtctatagtctgttggtggttcttgaaaagttactggataaactaaggttggttttctaacaacgttgggccagccctcttcagttccatcatgtggtggcccaagttcttgtctaaattcctctgattctgtttgagtagtttttcttattttcatttataagtctttctaaggcttgtatcttatcaacccacttttcatatttggcacaattatcaaaccactttttatattgttgtgcccaaatcctgaaccccccaaatcaccaagagacccattctgatgcaaaagccaagagtcttttattgttgtttaatgagctaaccccattagctcgggccctttgttggttcatccaggcagattcttggagaaggaccccgaaaaaccaggaggcagggaatatattgggtagagcaaggggagtgtctagggttctgcaaccatctcaggattggtgcacttctgggtttgggtgacctgtcctgtattgattggtcaactggttgttatggcctataggccctcccagggcagttactatgctatgcatggcactgttgtgcacttgtaccgtaacgcacacccagagccataaagcatagcaccacagctaatttctgattggtttcttgccacgaggagggtatctgacctcctagtgactggggcaggctcagcaagtgcatgttgagtctttcctgcagcctgtaatggatgctttttaaagcagggggctggtcccttcaatagttgacacaaaaaccactatggctattaaggatgaaatacgaattaccagactgatagtaattacaaacagcattatgtcgttcccagataagtaattcatccccgtatttcctgcttccatttccaagccatccaaagtagtactatacaggtcttcttttgaaaggtctgctccctcaatcctcttgagggcacaatctctcagggaataaaaaaatcccattgggacagctataacaacaaatcaaaccagatattgaaatacaatgggaagaaactttttaaaaacaaaaagactggaagagtttcctactggatcccctaacaggtcagtgggggtcagctgaagtcagggactcttgtcttttctatcatttaaactggagctgattccagactggtcaaattgctcatgtctaggtgagctgcctttgactcggtaacgtttgttctttgacaccaagagcatctgctggccattcagacttttgcagtctgtgtgccaggcagattttcccacgttccagaaactctacagtccatacacaatggggtgactaattgacaatcggtgcttcctgagtactgaaggatcatgggagcaaaaagatcttctgagatgcgtgcttgagaacccgtctccacgctttgaaaccctgttcggccttaagcaccccgtgggaaggaggatgttgtgtaagtgaagacctatgttcctggtccagctagctgtgagctgtacagcagacaggtctctccaggattcagaaggctccaccttctgactttcctctgggagcctctgtacttacctccaggtgtgttgaactctgttaactcaccaaaaggctgaggctacggagcattgtgcaaccatcaactcccaacgaacagatggctaccttagtctccacctagtttcccacctaggccatggcagatctcttcagactcagtttctcattcttccctgtttttacagtcccttggatagctcacttttaagcagactggcgtcaagactcagcccttctggccacagagagtgacaaaatagacctctgaaatgttgactcattaccaaagggagttactaactcacaagtcccctaattgggtttaaatcttgtgagaacaatgggagagtcctatgagactgccagtctctttttcctagggtcacttgtcttactttcaggctgagccttctgttttccttcctctaatggggacccatgtgctgtccccttcttgttacttgcctgtcttgtttccctctagatttaagctgtctcattagctacttaggattcttgtgctcaccgcatcttctctttggaatagaggcttccgtcattatcctcctgacttttcttgtttgctacacacacggaggcagcttctaattgtcatcctactgcagaagtctgccttggaaactttcattaaaagctggtatgatgtgtcaggttataaaggggctggtcatgccttggataatggttgatggtaacttcactggtgtttattaacatttcctatagctgtgagtgccataggcttcagtttcctccctgaccaccttaaagtttcctgaaggacttcttcagtggagactgtagcagaatttgggaatgcagcaaaatcactagggaaatccacagaaaataattcacatatattaaaactgtacaaaagtcattaatttaagcttccttccactttagaataccaaagaagagtaattaaagccaacatcagatagaaacataaaattaaaaaattaaagcagaaattggggaaattaaagacaacattattgcagaaagccaacaaatccaaaagctaattctttgaaacaaacctttagacagaaatgaaaaaaaaaggataattactacagtcaccatggatattaatctttttctcattaattttttaaaggaactttgcaagtacacctaagcacacaatctgattacaataattccctgaaaaacacaaatagccaagtcacacaggaataaataatttgactgagcctatacctatgaaacaaatttaataaaaaaaagttaacactctgtgaacataaatacccaggactagaaggaaacgctaaccaaacataaggaaaaatgacttaaatagaacagaggaaagggtctaattcattctgtttatagaattctaccaccagaagtaccctaaaattaaaaccagacaaaagcaaaatatttatgaaataaacatatgaaaaggcaacaatgtttatagattggaaaacaaaataacaaagctaaaaatagaaaccaatgaaatagccagtcatagggacacgaacttttgaacccagcactcaggaggtagaggtaaatggatctctgtgagtttgatgccagcctggtctacatagtaaattttaggacagctaggctgtgtagagagatgctgcttcaaaaaccaaaaagaaaaatcaatgaaatagaaaaaaatcaattaattggattaattggaataacattggaataaagaaaacttataggattttgaaagtagtaagagtttatgcagttattgttaggctgattatgaaagaaaagaagaaagattccagctattcaccaacaggggatgaatatacagaatatataaagaattcaaaagaaatgagcttagttatgtctctggtttgtgtgatgaaataacttaacaaaagcaaacaagagaaaaggggtttatttaggctcatagtttgagggcacagtccatcatggtgaggaagtcactgcagcaagagcttgagtagctggtcacattgcatctgcaatcaagaagcagagagaaccaaatggtggcggcacacacctttataccctacactcaggaggcagaggcaagcagatttctgggcattggaggccagcctggtctacagccagggctacacagagaaactctgtctcaaaaaatgaaggagaagatgtaatgagttcataaaaccatgttctgacaccatttgtaatgataaatctttcttcctgctgctcgagttccgccgccacatatgcggccaaaataatacacagagacttatattaagtacaatgctgccggccaatgactaagatttcctatctgctagatcagtcttaattatcaaccataactattaatctaaagatttatcttacagagacgtcaggaggcaggcatcttctcttgccgggatcacagagaggaggagaaggaaggaagagagtgatttcctgcttgttcctgattatattctgagtctgattgctatgtcacttcctgcctggatcacaagactttactacatttcccagaatcctccttgactcctagtccacctatcttgctttcctattggccaacagatctttatttatcaaccaataagacaaacataaacacagaaggactttccccatcaagaaggaggaggaggtgagaaggaggaaggagagagatgtatgtctgtatgtatgcatgtatgtatgtatgtatgtatgtatgtatgttaattcatttgtccaaaaccacaacccatgaaatgacccacatttagggtgggtcttcccattgcaattaacctaatctagaaatttaccacagatgtgcccagaagtccatttccatagtaactctaaatcttctgatgttgacaataagactaattttataaaaattccagttgctctaactgaaatcttcccataatactccaagaaactagttctacacagccctggctactatagatcaggctggcctcacactcacagagattcgcctgccctgcctgccctgccttgctttacctcccaagtgctgggattaaaggtgtgctctaccacatctggcttgttacgattttaaatgtatcttttacaagaaaaaatgtttcagtccttcctttcttcttaaatgtagacttccctaactgtcaggaacctggttacggctttcttctgccttttccaagcttcccaggttcatcagcataaaaatattggcagtggatattattcttgttttaattctatttatttatatttcatgtaagagtgctatgcaagtatacctgcacacaagaagaggtcatcagatcttattatagatggtcacgagccaccatatgggagctaggaattgaactcaggacctctggaagagcagttagtgctcttaaccactgagccatctctccagctctgtggatagtattctcattgttgttgtgtatttctattggttccttttaattttacatttctctgaggaaatacctgtccttttgtcccccttatctgttacaatctctatgaaattcataataattactttaatgggatgtcttctaattctacacctgatatatcactacaggctaaaaggttccattttatcacaattttgtacagactacattgtaggatgaaagacaattctggatttctttgaggggaagttcacaccttctgccgaatccattactgaccatgaggggtgagcattcaggtccctcccagggcagcgccctgctcaggctgcgctgcggcgttcactgcgctcggtctgcctgtgattgccccaaccccaacttccagctctgtctctacttcactgtgtttttaatttttatttcttttaaattttattcttttgtttgtttgtttttaattttggttttggctttttcaagacagggcttctctgtataaccctgagtgtcctggaattcactctgtagaccaggaaggccttgaactcagagctctgcctgcttctgcctcccaagtgctggaattaagtgcttgagccaacactgtccatctaaattctacttttaaactcattacactttgaaacatgaaactgggtgcctggaaaccacagtaagaatcctctgtggtactcaagaaaaaagttttgtgtacagctctccccagattactgttatgcaggagacgttaaaattaagagttgaaatgttccattggggacaacactgttctttgctccccagtgagatcttgtcatcttacaaaagacattaaaattactgacctgcagagagtcagctaaagacactatttacacacatgctagttcttggatgctctaagtctccccatgccctgtctgggtaggtgtttccttaccccatagccatagaaacactggtgactagatcggtcctaagcaggcattggaaggaactggatttccaggtgaggttttggtagcctcggactacacacccacttcccaccgtccttctcagccaagatgctcaatgagggagatttctttttaggatatagagctttttagttgagacttagaaaaataactttgtaccctaagaaacagttctaagtatccatttatctttcaaatgatgtaaatacgtgagtactcaagtaacactgattattttctattgactttgcacattgctatcctgggcagcattggaggggaggtaagttttaactcgtgctgattaagcactttctgttttacctctttgatgtgtataaatcaaataaaattatgcctggatgaatggcatgtgtgagctccaagttgaaaatttaaaaataataatattacatactttaaatttatggaagtgaagtttgtaatgaaaacattgcctccttcatcaaaccctcatattactgaaaaatatctacaagtatgtccttgggaaaactggccaaatctgacattcacgaaatgcaaactaagggtgttagttcataaacctgtgtcctgtcagttaggaagtgtcacatgagagtacagagaatacaagtttccattatatatatttaaaacaagtaattgtgtttgtttccttttcctcgctccaaaacacctggtaatgtaatttccaagagctgggaaaacagaatatttttgaccgttaatcctaatcctctctgtgtgactgagcaatactcctgcccatttctctgcttgggggtattccccaaactcattttgtttagaggagcccgaggggaagttgaaactgattctaccttgttcttttaaattcaggttttcccctcttttgtaccactggagatatttaacatcaacagatatttctttgctccttactaaggtataggaatatgtggagaaagggagttaaatctgttttggcaagaaagctggcttaactcttgtctcattgtggagttgatcagggagccaccctcctgcaggactgtttgtatgtcccagtaatgacatctgggtatctgagacagagggcctctgaggtttcctgtttcttgacttcaaggaatgcttccttttctactggctttttctcaacagggatgtcaaagcagtgacatcctattaagcattctagctgcaggtgtgagccctgggctctgctctctaatcctgctattttacaaaagcaatccgtaattctcactgttttccacaaatagccacaatgcatttgcccaaatactctccaggcttttgctggcctcatccctgaggtttgtctcatgccacttgcacacagcactcacatctggcgtgtgatgctccactcttccctggggtgccagtcttttctcactgtgctcttcatagtttcccagctagaattggtccccacagtaaaagatgctgcctaatttagcctcagcttaaactcacctgcaggaagcaggactggtgcatgacccagaacctttggtccattttgaccttgtagatggtaatgaggacaaagttagtgaaactgaactgaagaacaatgacaaaccaaagcatgttcttccactaaggctgaccatgtacttcttggccctggacattaatgttatgattgtccacaaggcagtaagtgtccacacttactggcgtctgctaatgggttttcttttccctgtactccctgcttgtacattggtctgagtacaatgtcttgaacattcaccactatttgggggactatttcatgatgcctagaatatccgcttatgtgacccatgtaataaaggaatcttaactgctattctccctctgaagttattgtagttattgtcactaccagctcagacttctctttagtatttatttatgtttcctttccttaattgtctacttaggctttccttatctgatgtgaccagtttccaaaatccttgctattttccttgtggttcatgtctatgtctgtgatccacaagtgagcattgcttgcagaggactaaagttacagtggttgccagctgctgtctagatgctaggaatcaaaccctggtgctcgggaaaagcagccagtgtgtttgactgttgagccgtctctttacccagtcccccatgcaatgtttatgcttggcacatgaggtgagtcagatgttgtctctatagccatggctcctcaagccatgtttgaggagggtctcccagactattctgcagatgccagggaatgtctgttctgccctgatcttctaaactaagctactcgaggcagatgtgagtacagggagggaggcacagtggaagagaagacactaacaggatactttttagcctgtgttctgtaactggagtcccgccaggtcccaccgccacttcagccccaaataaacacacaaagacttatattaagtataaacgtgttggttgatggctagggctttttactggctagctctctcttaattattaatccataactactaatcaaagtatttctatgtggtcttggcataccagagaacacctggcacatcctatcttcctggtctctccatggtgtctctccaaggtctctctctgcccacctttcccagaattctcctcatctcctagccccacctatcttcctgcctctaatggccaaacagtgttttatttatcaacgaataagagaaacatatatacagaaagacatcccccatcattgtttataaagggttcacatcctccaggacctatttgctagtaaataatgtactaggaagaaaatagtgatacatcttatttttaatgcatataaatgttgagcatacatatataacaatggtgttgtgtgtcctttaggaaatttggtcaattagggttatattttcttttgtcttttctcatgcttcagggatgccaacataggtgggtgcttctaaatgtgccaaattgtgtcacttgtcttactcagtacttaaaaggaggctgtcatccttcagtcacaacagggtcggcacacataagatctcatagagactacagcattcaccaggcctacacaggtctaagccagatggggtcctggctctgaaagggggaagtggacatgagatcccatccctaaccacacttaagggcaggtcctatgctcagcagtagatgaccaacacaaagtaaactcaatggtagttttgtagattttttttgtctcatattgctttgttttggtatcttttttcttattggtctgatatttttatgggttttggttgtgtgtgtgtgtgtgtgtgtgtgtgtgtgtgtgtgtgtgtgcgcgcgcgcgcgcgtgtgtgtgtgtggtgtttcttgtgctttttcttttattctgtctttttattattatcatcatcaacaacaacattatttgcctgtttgttttctaaataaagacaaaaagaaggtgtggagttgggtgggaagggatgtagggaccacctgcgtggagtgtgggagggaaattgtgttcagaacatattgtatgaaaaaaaatattttcattacaaaaactaaactgaaaaaactcttgggactgctgcagaccccgccccccagtgatgagtggcacaagagatgtttatcagtcgcctaacaccctttttctcactattcttgggtcactcctagcaagagccaatcttggacccaaaaggaaactcatcagcctcctcctcttcccatccctttctgccctgtaaacacttggcttgtgggtggctggcacactatgattcttttgaaggtccccccaaaaaataagaaccttggagagatggctcaacagttaagagcacttactgctcttgcagaggatccatgttctgtccctagcacccaagtcacaaacctgatcccgaatactgaccttctggcctctgcagacatctacatttgcaggtatacacacacacacacacacacacacacacacacacacacacacacacaccccacagacacatagatataatttaaatttaaatctagacttttttgtttttgtttgttttttaggaatctataacatttctgtattcctttagtgcctatactacaaaagtgcatggtctaaaaagccaggaaataatgtatccttacaccctaattcaattttaattctaattctaccagccatatggattccacatacctgcagagaaacatattgacctatgtttctaccagctagtaactggcttttgtttacatgaactagtcatcctagcatgatggtttacaaagcatgtgagggctacactcctctttggggagttaaagagaaaaagtctaaaattctatcagaggctgttctaaggtttcaataacttcatgtcttctatcttttaacagagtctgcattgatcaactattgaaagaactgtattaaatatcccaagttacatgtatgggaagcctcggagtaataaaaaacagttgcttctttcttatagacaccattatgtaccagaaacactctcatgcctggtatgtatagttcatctttttctcataggagatgtctactacctaaactatggttgtgcatagtttatgactggactatagactgcttaagatcacactcagagtagagcagctcataggtgtacattcagaccgtgtgaaatcagagtccacatgtaccagcattccctctgtcaatgtatcaagatgtattctggtgataaatcatctaaaataaagacaatgcagaagtcaatatacctatgcacttatctgatccattaatactctgcttgaaagagtctaagatccatttcttcacaacttcctctaccaaaactgttgctatgtactaacaatcaagaagatacagataagggaatgaggaggtgtctcagatggtagagtgctcgcctcacatgcacagtgccctggcttccatctcaggcaccacacaaaccaggtttaatggtatatacctatacacccggcactgggaaattggaggcaggaagattagaaattcaaggtcatccttagctacatggtgtcttcaaggccagcctgtgctacatgaaaccctgtgtcagaaagacaggaaaggaggaggaagaggaagattagaagcaagtaagacattgctcttgccctgaaaaaaaaaaagaggtgctaatcaagaaatacttgctctactatatggcaacgtttattgtgtaattaagtgtatggactgtgggagctagcagtgggaaacagagtccagttgtgactagaaagtgggggaagaaagaaagagtggggatggtttctggagagcatgaggagacaggacagggtgcgctgtgattggtccacatgtttccaagagggccatcatgttgactgagattgatgaagacagtagtaggtaataaacggtttctctcgctttactttcagatatgccctatgtgtttctttcccccataagatgaacagaaacaacccactgtacaataacaatggcataagaaatgcctttttctctcagattgcctttgggatcttggccaataccatcctcctgctcttcctcgtgatgacactcttccaggagcacaggcacaagccggccaacatgataactggcctcttggctctaagccacatagtgatgctgttgaccatggccttcatggctacagacattttggggtcccagagtttttgggaagacttcacatgtagatcagttatttccctgtacaggctgatgaggagcgtctccatctgtgctacgtgtcacctgagcatcctccaggccgtcatcctcagccccagaagttcctgtttgtccaagttcaaacacaaatccttacatcacaactcctgctgctttctttccctgtggagcttctatatgtccattagcggttacatgagcttcattgttgccacccccaatgtgacttcacacattcttatattgatcactaaatcctgctctctctggctttttagcggcctcatcagacacttactttgtgtactggctgtcgtccgagatgccgttcttgtagggctcatggcgctttcaagtgtgtacgtggtggctgtcttgtgcaggcataagaggcagtcacagtaccttcacagtgccagcatttcccccagagcatctccagagcagagggccatctgtatcatcctggtgctattgagtttctttgtggtcatgtactgtttggactgcattgccttctccttgagaagtatgtggaataatgacccaactcaccactgtgtccagatgtttgtgtccagtggctatgccacactcagtcctttggtgttcattagcactgaacaacatataattaactttttaaaaaccatgcagggtggacaataactgtttgcttattctgtggtgaaaaagcttcctgagcacgttggctttggggtaatcaatcacggcataccatagtgatctctgcgttagataaaaatatagacatagaaacatttctcggtgctggtgcacacctttaatcccagcactccagaggcagaggcaggccgatctctgtgagttcgagaccagcctggtctacagagtgagttccaggacagccagggctgttacacagagaaaccctgtcttgaaaaaccaaaaccaaacaaaaacaaaaacaaaaaacaaaaccacagtctaccattcaagcttataccattctgaaataacacaagttattaataattttagttgtggtcagaacaagactcaatcattacagcacaagagttgcttacacattacatgtgagaatttataacacttttaatacatcattagtcatagtgtattacatgactttcaaacatcatttcactaagtatgtaagttattattatcatgaatcaccatgctatatacactataatctatagatgtaatgaaaatcctataaaaatctagactttttttttttacagaaatatgtttgaaaattctagaatcctccataaaaaggcaccctttttgtttgagggtatgctgctcagtgcaactgcagctaccctgacagttttaggagggaactcatctataaccttagcacttgggaggtggagtcagaaaaaccaggtgttcaaggccagatttagccacatagtgagttcaaggccaacctaggctccttgagcccctgtcaatgaagaagaaggagggggaggaagaggagaaattgctagtcaatgaaggctcttcctttgtaattcaaactcagctttacatagcaagattactctcatcagctatcagtgccttaatcttagaattcccacaacccaaaaataatgaggaaatacatttctgttccttattaactatccgggctgtgatcttcatggataacagtccaaatggactaagacgggacttcaataggaaaagcaatcttaaggcagaacaaagctataagcattaaacatcctgattttaaatatatcacagagctataactgggacattatgattctgaaataataagaaacatacacacaccaacaaaaaaatacagacatacatgttctgctgacctttgacaaggatgcacaatggggaggcagcactattttaaacaaacggtccagagagtggtgacggaatatgaaccctcatatctaaataatgaaggtggacccttatcttccatgtaaaagttatggaagtgggctaattgttttaatgcaatacctgaatacataacctaggagaaaacatgggcacacagttacaatgtctccatgtcccctgggaacacgattatcattctgatttgcctcttattcaatgtacacatgtgttgatttaatgaaaatttaaattaacaattaattataaaaatttaaagaatagaataaatttgtgaggataacttttaaaaagttttattagtgagtgtgtgtgtgtgtgtgtgtgtgtgtgtgtgtgtgtgtgtaagtacactcacacatggcatgcatatgggaatgggtgtttgacatcccacacatgtagaagtcagaggacaatgttttggagtcaggtctcccctttcacatttatgtgggttctggggattgaacttgtgtcatcaggcccacactgcaagctccttagcctatagagtgggcccagcagagtacatagctgcatctattacatatcaccaagatgaacctggcttcttggagatatagctcatctaaaatctgacaagagaaatgacaaaaggagcctgagaaagaaagtgtgcccccaaatacaaatccacgacaaagcacacaagaactaagctaaaagatcgtgaaataaccgatgctggaagaaagtgattagtaaaataaatggctttaagtagcataatgtgtgtgaaagcacaaaatgaatgaatctctccacactgatgtaaaaacatgtcaccgcacacacaaaatgaatgtatctctgcacactcatgtaaaaacgtgtcaccgcacacgataaaggatgggaaagaaatcttacagaagagttgatagcatttcctctaacaggtagagttaccttctctttaaggtaacttgcttacaaagaaaggaatgggggattgaggagatggctcagttgtagaatgcctgctacacaagcatgaggacctgagttcagatccccagagcccatgtgtgttagtcagcgtcctctagaagaacagaatatagaatgaatatatatgtatgtgtgtatacattccatatatgtgcacattgtgtgtagagggaatatacgtgtgtgtgtgtgtgtgtgtgtgtgtgtgtgtgtgtgtgtgtaaaggagatttattagaatggcttacaggctgtgatctaactaattcaacaatagctgtctaccaacagaaggcccaagaactcagtaatttttccatccatgagaccagatgtctcagctggtcttcagtatacaccagagtcccagaaaagtaggttctaatgccagtgaaggaatggacttgccagtgagagcaaggacaagcaggcaaagaaagcaagcttctttcttccatgtccttcttagaggctgctagcagaaggtgtggcccagattaaagggggattgattggtcagctggtcattatggcccatcggccctcccagggcggttgctatgctctgcacgtcactgtggtgcacttgtccataaagcacagtcctgctagctaatttctgattggttctttgccacaaggaggccatctgacctcctagtgaccaaggcaggcccagcaaatgttatcctgtcatggctgctgaaacagaggggggtgctggtcccttcaaggatagtctataaccacctgtaactccagtttcaggggatctaatgccctcctctagcttccatggataccgaaggtacatggtccgagacacacttacaggcaaaacactcatactaaaactcaaaagtaaaaatctcttttttttcccaatgaagtgaagaaaggaacctcttttgtacagtggaactccaatttgaaggagtgagagaaatacaaaaatcaacagtaggggtgttggtaaactgagtcacactgaacgaccaaagcgagacactcgagggtgcaataagggctttgcagcagcaggggagcagtctcgaaggactgaaccccgaacagctatgcagagtgtattcatcgattgttacacaaaagttatctttagggtaagtcaagctccccgtcccacagcctctgatctgatctgtgtgccacctggaggaacacagggcccatgcacacacttctcagtacttattgtgcacggtttgcagtgctcaataatacaagacttccaggtataccaggagcgccttacgtctgaagtcatgcaaaggccgtaaagctccttcagaaacacagctccataaatctcagaaaataatcactgattgtaaaatgaaaaataaaaggccaaaaaaggggatttgtggtaacatattatttgtgatttattaaagcttgcctgaagattcagaaagcaaagtcagccacaagccacagaagccaggcacacacctttaatcccagcagaagctaggaggtggtgatacacatctttaatcctaggactcaggattaagaggtagagggatatatctgagttcaaggccacccagggatacaagagattgaatcagtctaaaagagtaacagatcacacacctttaatacactagaagggtaggaaagatagaagcagggtcttcagtagttagcatcaggcattcattctccagccacactgaagataggcgcattcagtctccagccacgctgaggaaagcttgtgggtcagcccttttggcataaggtagaggtaaggattagtggcaggatgctttgcttttctgaatcctcatgcaagctttaataaacaataaataacatatcaccgggtggtggtggtgcatgcctttaatcccagctctcgggaggcagaggcaggtggatctctgtgagttcgagaccagcctggtctacaagagctagttccagaacagcctccaaagccacagagaaaccctgtctcaaaaaacaaaacaaaacaaaaataataataatatatcaccacacatcccagtcagggcatcgagttagaagacaaggaaaattatggagacatgagaggggaaagaaactccttctctggtgttcaagttcagtttctgttgctgtgataaacgccatgactaaaagcatcttggggaggaaagggtttatttggctattgttcactgtccatcatcaagggaagccagtgtaggaattcaagcagaaactgaagcagaaaccatggaaactgctgcctactggcttctctcttcggtttcttcattagagtgagtgcctatggagttgttgcctttgtttagcgtttatattcttaaaagctcgggtctacctgcagtaggctggaccctcctccaccaaatagcaattgagaaagtgcctcacagtcatggctgcaggccatgatcagggcaactctgcagctgcggctccctctttctgtgtcaacttgacaactgaagctacccgtgacacccaagaatctcaccagaaaaaaaaaaaaaaaaagcaagcatctcaccacaattaatttaatagctaactgttgaaggaaccggcttcccttttggcagccataacagcctaacacgtgcttgccataaacctaccttggtcacgtagaggtcagatgcctgtctcgtgacaaggaacccatcagaagttactcattagaaagtcagatgcctgtctcatgacaaggagccaatcggaagttagctggtggcgctatgctttacgaccctgggtgtgctttacggacaagcgcacgacaatgacgtagagagcatagcaaccaccctgggagggcctatgagccataacaaccagttgaccaatcaacacagggcaagccctccaagcctggaggcacaccaatcgtaagcctgtgcgtacccctagacactccccttacgctgccctataagatctttggggagaccttaggagccgtcttttctagccgtctgccatggcgggtgggtgaaagacccgagctaacatggggttagttcgttaaattacaataaagcctcgtgcagtttgcagcaagctctcgaatccgcctggtgattgtggtgaccgcgaacctggcctgagaccccggatacttgagttttcgggggtctaacattttgggggctcgtccgcgatcacccttcacctgagtggattcgatcttggaggtaagatgattcgagctcgaaacttgtatatgttcaatgttctatgtttcttgtttagtctcttgctgttttgtttggtgccatgatttgtatttgatctgcgcagaatttgtatttgtaattcggacttctggggaagaccctgaagtcctgccctggatgaaagtccgagggttgcttgatttgatctgcgcagaatttgtaatttgtatttgatctgcgcagaatttgtaattgaaccatagggtaagcagacttgcgagaaccttggttccaccctggatgaaagtccaaggtttggttgtaattttggtttggggcaccatttctttgccgcggtttgtcctgtctaatgtttgtgctgtctaatgtgctgtcatttgtgttatgtgtttcttaagcatctctttctgtcccacattgcccatgcacgtggcatgcatgggtcagggggtcaggggtcttttcttctctgagcacatggcgccacctcaactgttatcggcagatgcgccggaggacagactgccactctgaggacacccaggacccaagaggtatggacgcgggccaaggacacttggacccgcctcagttagccgccaggttctgccgcctggcttcccgcgccattgccttataagcagcgcgggcggattgggttggcgtctattctttcctgtctattctgtgttatcatccaccacgccacccccctttctatccccacctgcgggtctgaggcatgcccagtaggactgtttctgccccagcggctgtctcgggtgtttccctgctctgagggaacatggctacaaggctgagatctgctacccgtctttctgtgctccacacacatggtatgcaggggggccgcaggagtctttttcccacccctggattggcctagggtctggggttaccagcagcacccctaccccaggtctctctgccttgagcacatggagctagctcaggcagatgaaccatcagtcctgatccggatattcaaaaaaaaaaaaagggggggccttaaagttattaagaactataaaagggactttgacaaaatttttatgttaactaaaaaataaaaaaaaaatgtaagagacttaaataataaagagggaaaaaaaattgtctagaatgtctaagagggtcagaaataaactaaaaggttatagagggttaaagcaagttgttggaggtcagagaaagagaaagttatagagggttaaagtaagttgtaaaaggtcagagaaaagttgttaaaggtcagaaaaaaggttgttactagtcaaaaaaaatgtaaactatgctatggtttctcatgtctaaaattttaatcatattaagctgattttgttttttaaaaaaaaaaggtcctgtttatttctcaagtaatttatatatacttgttttaaaatgttctgtttcctggtttagccagcacatggccaactggtcacatgatttgactggtcgccattttgctaaagttaaaaaagaatacttaagccgccatcttgactaaaggtgaccccatggaaattagaggtaccatcttagaaacaagtttttcaattaagatttaaaatgttaatgcttctatatattacagaaaaaccttaagggaatttaaatttctttttaaaaccagttttcaaatgtttgtttttattaatatttgtacttaaagagcttcaatttagaattatttttaagcaaagcctgacaatgtaaagttcttgttttatgatgtttttaaaaattaagtttaagatgttgataacacacacctttaagcttaggatgttgatggcacacgactttaagttgagggcgttggtggcatacgcctttaatcccaccactcgggagtaagaggcagatggatctttatgagttcaaggcctgcctggtccggcagatcgaattccaggacaggctccaaagtcacagaaaaaccctgcctcagaaagaagttaagctactgtttaaggaatataaggtagctctatacagttttaagttcagctgtgctgtttcaaacattttactaagttaaaaccagttacagtcagactaaatcatttacagaaataagaccttacctagccacctgtgtgcttcttgtgtgcttaaggaaagcaactaaaacagacctctaatgcttcagagatcttcagaatatggcatttaaattgttatctttaaagtttaaaatgtcagacagactgccagatcctgacagtgacccaaagtctccaaagaagattacgaggcacctcagttcctgcacctggaccagtgagcgagatgctcagatgtgatacctgccgcctgccagaacctagccgagactgtggacaaagctgctggacactggaaaattgattgcacccctttgcctagacaaaacaaggtcagtcttttccatgtccctcttccacagagaggaaaaaaactctcacagtataggcctggcgaggattgctggtctttgagacacctgcctccagcggtaatggagaaacttgggtttggctaactgtatatagactggcttctgtcactttttagtagattcggacaaaatatacccttctcagatctctgaaatattactggttgtcagcttgacagcatcagacagtcagatccactatagactagtcagtatgttagctaataaaatagtgactatctactgttcaggcacaagttcaaagtttttaagtttattttggttgtcatctaagtacaaacttaaagggcttttcatcaggccaaaggcacctctgtccaatccatacctggctctctggacagaagaaaaatgtacatgcttatagcccaaatctgcagtttttgctaggactcaaagttataaatatgttcttgctgtttaaacagatatctgctttttctacactgtgggcttcagtaaataagctttaacctctgttcccagtttaaacatgtcttaaacaggtttctgcttctggcagacatctgaatatcagttgctgactacagactgttctaagactgcgagccctggacttgctgtggatgtgaaccagttcagctgatatggacaccccctgtctctgcaacagtgtctgctaaccagaagcccctgatgaattccccattgcctaaattcctttttgcttttgactagcatttcaaccttctggggtccctaacttcgtcccaaagtcagcaggaagcagtttggaaaagaatttcgccgtccattttccctggttaaaatgctaagtcaaaaggaactccttacatggggatgccaatatctatcacttcctgatggggatactagagagacagcaattccatgattggaatttccagaaaagaaaatgggggaatgaaggaaccggcttcccttttggcagccataacagcctaacacgtgcttgccataaacctaccttggtcacgtagaggtcagatgcctgtctcgtgacaaggaacccatcagaagttactcattagaaagtcagatgcctgtctcatgacaaggagccaatcggaagttagctggtggcgctatgctttacgaccctgggtgtgctttacggacaagcgcacgacaatgacgtagagagcatagcaaccaccctgggagggcctatgagccataacaaccagttgaccaatcaacacagggcaagccctccaagcctggaggcacaccaatcgtaagcctgtgcgtacccctagacactccccttacgctgccctataagatctttggggagaccttaggagccgtcttttctagccgtctgccatggcgggtgggtgaaagacccgagctaacatggggttagttcgttaaattacaataaagcctcgtgcagtttgcagcaagctctcgaatccgcctggtgattgtggtgaccgcgaacctggcctgagaccccggatacttgagttttcgggggtctaacactgtctttctctcttctgcactgtaaacctgcagttttagaggagtccttccagaaaccccgttctacagggaaggggcatggacgagaaaccgcttgagcaaccttagtgccgtctagatttactttatcagattataattccactgaggagcctctggagcagcattaaattcctcctgtcagaagagaaaggaaaggggagggaagcttcctcagccgtctgagatactctcgaggaccacacgcacctatgattactgctagaacagctaactcattgttgctctcccttgaggagcccacacccacaccggatgggtctttcttccggaacacctcctccctaccgctcaggtccaagcctcaaatgtctttaaatgatctcctgctccgcttcaactggctatgcctgaaattctttttggcatttaagacaaaattcctagtttggcctgagaggaggttcctaagagattagagagactctttttttttttttttttttttttttttccttttctccagacagagtttctctgtgcagctctgtagagaccaggctggcctcaaactcacagagatccgcctgcctccgcctcacgagtgctgggattaaaggcgctgcctactgaaggaaccggcttcccttttggcagccataatggtcgaacatgtgcttctatgaccttgtcctagaaaccagaaagtcagatgcctgtctcgtgacaaggaaccaatcagaagttagctggtggcgctatgctttatggctctgggtgtgctttacggacaagcacacagcaatgacgtagagagcatagcaaccaccctgggagggcctatgagccataacaaccagttgaccaatcaacacagggcaagccctccaagcctggaagcacaccaatcgtaagcctgtgcgtacccctagacactccccttacgctgccctataagatcttttgggagacccaaggagccgtctttttctagccgtctgccatggcgggtggtgaaagacccgagctaacatggggttagttcgttaaattacaataaagcctcgtgcagtttgcagcaagctctcgaatccacctggtgattggggtgaccgcgaacctggcctgaggacccggatacttgagttttcgggggtctaacacctaccacccagctttcttttcttttctttttaagattgtttattatgtgtactgtgttctgcctgcatgtgtccctgcaggccagaagagggcaccagatctcattacaaatggttgtgagccaccatgtggttgctgggaattgaactcaggtcctttggaagagcagccagtgctcttaacctctgagccatctcttaaggctattccagatgacaatgtgaagctctgtctctgtcctctcaccactgacaacaggctcagaggtgacattaaggacaattcaacagtgggagcatagccacgggtggcgactttagagtgggcgtcctcggaggcggtgcttggtatctgtgtttgctgtctacggttggcattctcggaccagagcactggaacagcagcatgggactggactggaaaaggttcccagcaaatcccctcactcccatagccctacggccccgcatggtgcatggtgcaaaataatcgttacctaaaaataagagagagcacattgcatatgtaagatcgtgttatggtaatgtcaggacgcagattccccaccccatccagccctctcctgaggaggctgggaggactgagagggcaggctccgtcacaccagcctgacgcccggcaccatcacaccgtttgccgcattcacagatgccagctgtgaggctcctgaggtggcccctgccctaattaggacccctcctttgtgcaggctcagagaccctggccacctgccgaggatacacaggaccgtgggtccaatccccagctttacagattaaagtaataaaatgaaatggatgtccaagtgtgcggcagctgtgtctcacactccctctctagaactccaagctacggagcctacaaaggcggtgcagggaataaagcgacgttctccagaatccctgccaggccaagtgggtccccaggaaccccaacagcgaactcagagagtctgctcacatccacgcccaccgccgccgcctcccccggctgtgacccaggccacccaaggagactcatctgaggaccagcttggccctgggagcctgaaagcgtgcagagcgcccgcccgcagggtgctgcagacccggtgtagggctgccgccccgcccctctgccagccccgcccctctgccagccccgcccctcacaccccctcccctcccgcccccctccgcttcccaccacgtcgttctacccagcccagcctgagccgactgggtcctgctcgcttaggctccgcccaattcttccctccacggattggattctgtaggctcctcccagtcctgccgggcactcattggacgctactcagctggctccgcccaacacgcgctccgctagctatttccccccacccctaggctgtggctttcactctacagcactgagcttcgaggccactggtggctcctctcactaacccctccccctcctctcactaacccctccccctcctctcactaactcccctcctcctctcactaactcctcctcctcctctcactaactcctccccctcctctcactaactcctccccctcctctcactaactcctcccctcctcctctcactaactcctcccctcctcctctcactaactccccctcctcctctcactaactcctcccctcctcctctcactaactcctccccctcctctcactaactcctcccctcctcccctcactaactcctcccctcctcctctcactaactcctcccctcctcctctcactaactcctccccctcctctcactaactcctccccctcctctcactaactcctcccctcctcccctcactaactcctcccctcctcctctcactaactcctcccctcctcctctcactaactcctccccctcctctcactaactcctccccctcctctcactaactcctccccctcctctcactaactcctcccctcctcccctcactaactcctctcacctcctcctcctctcactaactcctccccctcctctcactaactccccctcctctcactaactcctccccctcctctcactaactcctcccctcctcccctcactaactcctcccctcctcctctcactaactcctcccctcctcctctcactaactcctccccctcctctcactaactcctccccctcctctcactaactcctcccctcctcccctcactaactcctcctcctcctctcactaactcctcccctcctcctctcactaactcctccccctcctctcactaactcctccccctcctctcactaactcctcccccctcctctcactaactcctcccctcctcctctcactaactcctcccctcctcctctcactaactcctccccctcctctcactaactcctccccctcctctcactaactcctccccctcctctcactaactcctcccctcctctcactaactcctccccctcctctcgctaactcctccccctcctctcactaactcctccccctcctctcgctaactcctccccctcctccctgtgaccgctcctgggatgtcccttgccccgtgtggttgtgcctggttctacccgtgtcaagaggccctagtgtccgtccgtctgtccgtctgtctgcgctccactattgcagccccgtccccacccccccacccccgctgtgggagcacttctgaaatgacgcgggggtctctcgcatcctctgcggtcgggaccaccgggctgcgccctcgcgcacagccccacaccgcagctaggcgagcctgggcagccctttcacctgaggtgagtcctcccctgcgcactgcaacggctagcgacgcgtgcggtgcccatgagtctgcgtggacagccggggagcaagaccgtgcacacggacggacggacggacggacgctgcggttccgggactgtctacccaaggcggccgggcgggcgggcgcgcgctcccggtaagcgtcaggtagggacagcaggaacctggctgtaggcgctcagagggactctgaggcgctcagagggactcttcccctgctcggagagtgctatagtctgcggtttctatacacacacacaacacacaacacacacaacacacacagacacacacaacacacacacaacacatacaacacacacacacacacaacacacacaacacacacaacacacacaacacacacacagacacaacacacacagacacacacacacagacacacagacacacacagacacacacacacacaacacacacagacacacacacacagacacaacacacacaacacacacaacacacacagacacacacacaacacacacacaacacacacaacacacacaacacacacaacacacacacagacacaacacacacagacacacacacacagacacacagacacacacagacacacacacacacaacacacacagacacacacacacagacacaacacacacaacacacacaacacacacagacacacacacaacacacacacaacacacacaacacacacaacacacacaacacacacacagacacaacacacacagacacacacacacagacacacagacacacacagacacacacacacacaacacacacagacacacacacacagacacaacacacacaacacacacaacacacacagacacacacacaacacacacacaacacacacaacacacacaacacacacaacacacacacagacacaacacacacagacacacacacacagacacacagacacacacagacacacacacacacaacacacacagacacacacacacagacacaacacacacaacacacacaacacacacagacacacacacaacacacacacaacacacacaacacacacaacacacacaacacacacaacacacacacagacacaacacacacagacacacacacacagacacacagacacacacagacacacacacacacaacacacacagacacacacacacagacacaacacacacaacacacacaacacacacagacacacacacaacacacacacaacacacacaacacacacaacacacacaacacacacacagacacaacacacacagacacacacacacagacacacagacacacacagacacacacacacacaacacacacagacacacacacacagacacaacacacacaacacacacaacacacacagacacacacacaacacacacacaacacacacaacacacacatacacacacaacacacacacacaacacacacatacacacacaacacacacacacaacatacacagacacaacacacacaacacacacagacacacacacaacacacacacaacacacacaacacacacatacacacacaacacacacacacacaacacacacagacacacacaacacacacaacacacacacacacaacacacacacacacatacacaacagacacaacacaacacacacacagacagacacacacacacagacacaacacacagacacacacatacaacacacatacacaacacacacagacagacacacacacaacacacacaacacacaacacacacatacacaacacacagacacacacacaacacacacacagacacacacagacacacacacacagacacaacacacacacaacacacacaacacagacagacacacacacacaacacgcagacacacagacacacacagacacaacacacacaacacacacacagacacacacacacaacacacacacaacacacacacaacacatacaacacacacagacacacacacacagacacacacaacacacacaacacacacacacaacacacacagacacaacacacacacagacacacagacacacaacacacacagacacacacaacacacacgcagacacacagacacacacagacaacacacacaacacacacaacacacacaacacatacaacacacacagacacaacacacaacacacacacagacacacacacaacacacacaacacacacacagacacaacacacacaacacacacagacacacaacacacacagacacacacacacaacacacacagacacacacacagacacacagacacacacagacacacacacacaacacacacagacacacaacacacacaacacatacaacacacacagacacaacacacacagacagacacacacacacacagacacacacacacaacacacacacacaacacacacaacacacacagacacacacaacacacacagacacacacaacagacacagacacacacaacacacacaacactcacagacacacacacaacacacacacatacacaacacacaaacacagacacacaacacacagacacagacacacaacacacagacacacagacacacaacacacacacacagacagacacacacacacagacagacacacacagacagacagacacacacaacacacacacacaacacacacagacacaacacacacacacatacacaacacacacagacacacacacacaacacacacagacacacaggcacaacacacacagacacacacagacacacacacacaccacacacagacacacaacacacacacagacagacacacacaccacacacagacacacaacacacacacacagacagacacacacaccacacacagacacacaacacacacacacagacagacacacacaccacacacagacacacaacacacacacacagacagacacacacagacacaacacacacacacaacacacacacacatacacaacacacaaacacagacacacagacacagacacacaacacacagacacaccacacacagacacacaatacacacacatacacaacacacacagacagacacacagacacaacacacacagacacacacacatacacaacacacaaacacagacacacaacacacacagacacacaacacacagacacacaacacacagacacacacacagacacacagacacaccacacacagacacacaacacacacacagacacacaacacacacacagacacacacacacagacacacaacacaacacagacacacacacagacacaacacacagacagacagacacaccacacacagacacacaacacacacacacagacacacacacacagacacacaacacaacacagacacacacacagacacaacacacagacagacagacacaccacacacagacacacacacacagacacacagacacaccacacacagacacacacagacacacacacagacatacaacacaacacagacacacacacagacacaacacacacacacacagacacaacacacagagacagacacacacagacacaacacacagacacacacacagacacacaacacacacagacacacagacacaccacaaacagacacacacaacacacacagacacacacacaacacacacagagacacacacacacacagacacacacacacagacacaacacacacacaggcacacacacataccacacacacacacaacacacacacaacacacacacagacacacacacacatacaacacacacacagacacacacacatacacacatacagacacaacacacacacacagacacacacaccacatacagacacacacagacacacacacacacagacacacacacacacacagacacacacagaaacacacacacaccacacacgaaaccataccatgcagagtgtacagctaaacgaggcaaagagagggtgattttctttccagagatccaagggtaatgacaaatggcgacgctagaaccgtaaccgctccagagccttcgttcacaccgacgtctgactgtggttaatgctgttagtgtcaatcttgtaactcggggccctgagcgaacttgccttctgtctccagcaggcggcgcaaagcagggaccgactgtgcacccggcccacctaggcctgcagtttggctgaaaatagaactggcaccaactcaagatccgtgattttcccttccctggatccacacagaatgtgccaatggggtcagcatggcctgccaagaatgaacttcccacggtgagtcccactgagtcacaaagcggcaaagcttacgtggctctgtgtcttagaatgaatcagttttcctcaggatggagaggatccaagttccccaaggattcagcagcctggaagttattagctcagagaacaccctgtatactaaaacaagccaaagcctgtcatggatcatgaaagtggcagagctgggacctcacccaggcttagttgacccccaggaacatggtgtttcccaaaaaggcatggtcctgtcgtgaacgtctcactacatactcaggctagcctcaaacgcagggttctcctgcctccacctcccaagcacgcactcagccttacagacctgcaccaccatgagctcagacaccatgagctgagctctttcctctgctccatgctcccatccggatgctctgtgctatctcaggccccaagacagcgatggacggaaacagtgagtgtaaacaaacttttctgccttacacttcatttgtctccataacggaaacctggttgacatagccaccttggtatataacatggtcttttcgattttagtgataaaatctttcggttattcaacggaatatttaaaggttcaatggttcgaatcccagctcagtcacatggagacttagaactttattgaactgattaattttatctctttaacccctccatgattcatatttttgatactgtaaaatgatgatggtcgtggtggtggtgatagtgatgacaacagcaatcaataataccgaggctggatttatttatccagctgcttgcctggatgtgtttctcaatcccgagttgttcttttgtccctcttgcctcccccatggaagtatttccactgcttcctagtctgcgcccaggatgtttgtgatgtgtgacgcctttctctagggcagtggtgcatactgggaacagagatctgagaggcgttctagaggagacccttcagggccttgatggacaagagaggaagatgaggagataaggaaacatggatgggacttagcagctgcagagagcacactcagggtgctaacaggccattgtgcacagcgcccagatggccagccttggaggttaggaggctgatgggtgtctaggggccagaacgtctggagagggctttgcacatctgtctggtaactgggctgggaggctgcagttgggactgtgactagaatgtcttcacagaatgacacttgttgggcttcttcagtggtggctcagggctccagtgtgcaagtgactcgtcacagccaattagcatctgtcacccaagcctgcaatccttgcagcatcctgtcgtagcagtgggagccatcaggggcctgctcagatatgagcaacaggggcacagagaactcctggcactggggacgatagcaaatggattgttccactgtgttctgaaagccttacccaacccacagccatgtctgcactggagtccctctggccagcctggctccattgtgtcccatccctccctacccgctgatgattgtgtgcagcgtgcgctcaaagatgaattatagtccgtgatggtaagatttctttattcaagaaagcaccagggcaaaacgcaggccagagcgaggtcacaggaacccagctagtgcggccagagagaaggggcaagggtctccacgtgcagcccttaagaagcttcccttacatcaccccatttccttctccatgcccttatgggcgagtccggggtccacctggtacctgtcccaggactattgggcagggctagggtgtctccctacaacccacccttgtggagtttctacaagacacacaaaccagataaccccactgtgccatccctccaatgtctcgttattgggtctgcaagcatacacctgccttccacctgcccgccttacttttctggagcatagcccatcactctctgtaggggggcacacttctgaacttcctcacaaaatggcccccttccccaaatgccaggacatttagatcctcctccaacacccagtactctccctcctgtcctcctatcgtgtgctctctgaagctgtgtgggcttacttgtcatctgtctcccggtggctccctggggaagaattcttgccttccttgtgtccccagggcccaccatggtgcctgcatagaccttggtagctcataaatggatgcatgaacagtggcttccataaaggtcgtggtgcatgcttgtagttcagaaagacatctagtctcccttgtagtaagtaggaaaagaaacagaagacagttgttcagggttggagatacagttttccagtctggctctgctactgagtagctggtcactttctggaaaatttgcctcccagagcctctttttatttatttattttttttaagttgtaacttgagcccagtgtttcacagctctctgctttaggctgtatagaaatggaaggagtcagccaggcattggtggcacacgcctttagtcccagcactcaggaggcaaaggcctcgtctaacaagagctagttccaggacagcctccaaagccacagagaaaccctatctcaaagaaaaagaaggaggaaggaaggaaggaaggaaggaaggaaggaaggaaggaaggaaggaaggaaggaaggtacagttgctctgggaatcctgtctagatgagggagggtggactgcagttcccgccgtgcccaccaggcgacgctgtaagtgtgctctgtgcgccacctgggctccagcctgcagctcagtgccaggaaggagcagttccgttagaacagggtcaccaggcttcagccaatgcccacaactgtggaggttgccacatcagagcacctgctgcctgcctttcatgcaaaggagggtggctcaggggtgtttgcacaaggtcaccctgtttggccagtggctatttagaagggaaccccttcctgtaaagttgggttcctgagtggatgggggggggcgacacgctgatgagctcttccaccccagttccctgtttagggcgggaacctaaacaggatggctgaaccaactcaggacgtgactgagtctggatcctttctgactccagaatagccctgaccctgatctaccaacttctacgtgagccatgggttggggaggagcgtttgtgcctgtctttcggcaccggtgctgcgatgaacccagcacacctctccccggctctactcggcgcctcctgtcatccctgagactctagggcgcgcacagcacaggaagcacgggagcctgccctgcaccttccaggggggctctaattcccccatccagcctgccctatgggatcagcatagccaagccatggcttcatctccccaaaagcctaccatacagttcctaatatgtcttccaaatgaggaaaccgaggcctggagagatgagctaacccacccaaggcctgacggtgctgagaagtagacccgggttcacaggtctctcaggcctgctgtgcaagcacctggctgcttctccagcccctcaccaggctgaggggagagagagcttatggaacagcaagtagacagatgatgaccacaggtggacagcagtgtgctggggagggactgctctgtgggagggacagtggctaagcccaagcaggagagcaagaaggggcaaagattggcatacaccatcctctagtctctgttctgtcctctgacccaggtcagcccagacacacattcccaactcccaaatcttccagttgtcactcagaggtttctgattcttctgagcccagaaggcttcagtctgctatcacacggggctggcaagacagctctttctctgtcagcctgttttccaagtcattgtatatgtcaactttttttttttccaagacagggtttctctgtggctttggaatgtcctggattgtcccgcgcgatcgtcttgccggcaagaacaacacaggacattcggatccttctgcagtaaagctttaatacgtcttgagaggaagagcataagcttacaaaagcggagaccccgagccaagaatcctgtcccctaataaaggctggcaaccgccgccttggacgtgttatcccatgattggctgtagctcatcggaccatatgacgccacgaaagacgcagagatcaaggaatggaaagttacccagtgcctgcgcgcattaactttacactcggtgcctgccggatgcaggcgccatcttgtaatggagaatgcagggacggctccctacactggatctggctatgtagaccaggttggcctcgaactcacagagacccgtctgcctctgcttcccaagtgctaggattaaaggcgtgcgtcaccaccaagcagcatatttcagctttctggcctgcagatgattcactctctgacccattagcctttaaacagcaaaatttaaaagaatacagtgcatgttgtagtctctagaaccatgtcacaaatccacccaggtaatatttgtgtgcccagaggccacacagggtgataaatggaatccttgggttcatttcctctatcccgatgggattatggtatagaaccaagcacattttcccctcagtgatgacacttgccatcctctacagagtccatctgggggcacttaagaagtgtcattaatcctcagggcaacctggccgtcgcctctaagtgctgctggttaacagatggaggctccctcagggttcctggctgaatgaaaaggagatgggagggactgccaggcacatcccaagagtcaacttaccagcttctgcatgggaacttctgaggcggtggctttgctgagagctgaggagggtatgacagggagccaagaactcccttggagcctgaagaccttggttgtagttcctggtgacctagagaatgtcctgagcccacgattgtgtgaaagactgggactctattctgactctagacggtaggccccactcagagcagaccgccaacagactacccattgctcgctcacctccacaatctcttctcccagctcccagctggcctgcaactaccaagggccacatggggaaggccatggccatctttctgagaccctgtgggcgtcctccctcccctagacacttcacagttctcttcccactcaagtcatcatcccggtgccccaggcttccattgctgccctggtttgggctcttccaagtcttcagctgccactgagtgatgtgatcttgttgactgtactgctgagagaacagggcctcatctgaaccctttatctccatttccctaatctctagcattatacctaaaaccttgcaggtgcttgtgtcttagtcagggtttctattgctgtgaagagacaccgtgcccacggcaacttttataaagaaagcatttgattggggcggctcacttaacagtttcagagttcagtccattatcggcatggtggggagcatggtgatgtgtgagcagacatggtgctggctacatctcaatcagaaggcaacaggaagtggactgtgacacttagtgaagcttaagcaagagacctcaaagcccacccccatagtagcacacttccttcaacaaggccacacctcccaatagtgccactccctatgatcgcatgcggtcagttgcattcaaactactgctatgctcaagaaatacctatgaagggcaggactgcccacaggactagcaaaggtagcaggagctctcttctcaacagaagggatagcctgtcagagcagacaccccaccaccagactgcgccacctgagtcctgaggtgcagtcagcctcattagaagctggtatacactcacccaccaggtgggagagacctggcagagatgggctacagtcatcagggccacaatgatacctcagccttgaggcaggagacagggttagactctggagtcagtctggattactatgagcaggcactgacagcggtctgcctgtccctgtgaggactcgggaagtgttctcagtcgggtgttaaggctggagcctggctcagagtcctggcttcgtgcggctgagcaagctgtgtatgacttaccatcttctgcaagccagctgtctgcaagaacctagtctgccattcccaagttgccttgcaattatccaatgggagccaggggtgtgatgggacagttgccatggaagggccaccctcagaatgagcctgaagaactctgaagtggatgggcagtggccaccactgtcaccacttgcaccccctgtctatggtgggcagacgaaggcctgagtctggtgaagcttgggttttagagctccagggttctttgctgtctgccatcacagctgggtcccagcttcatttgccaggcaggctgttgacagggaactgatcaattaattacttagtgatagattttaactggctattactgaatgccgtatcgtgacaggaatgagtgcatattaactgtgggtttcagaggcagtgacattccagaaagggagatgaggtgggctggaaggacacaacccagcactgtcttcaaatcctggcattctgagtggggcatctcagccagtggcttttcctcttagtctccctttaactatgacattgtaggaaatggtgtctgctattggggttgttgaaaatacagcacgggggggggggggggctggaggggctgggtttatgtacccagcacatgccaagttagtcgtccatccaaccgtctgtccccctgcctcgtctgcaaatgggagtgttgtattagttcctggaaggtttgccttaggcagtaactatacttttttttttttttaaataaacattgtgtatgtgtgtacaacacaacttatggtagttggttctggggattgaactcggaacagcaggcttcacctttatgtgttcagtcccctcaccagcccaggtatgtcctctcctaagtgctccgagtgagaagcactgggtgggaccctggctgctggttgccatacatctcttcactaggcaaacatttacagagtacttactgtgggtcaggccctgaggacacagcaaggatgaagaccaagtgtttgccttcagaatatgatcctgtggaaggatggtgaggatgggtggccaggaacaggtaacaagtttcacataaccggaccataaagcaaccaatgcaagggtttctccctgctcttcccaacagcccacgattccatcaactacagtgcttccactgtccccacttgagcagccagtgtgccaggggatgtcaactacttattctctggagaggaaatgaagcaagtgacttgtccaaagccacagccctggaggttgagtgggacctcaggttcaccccattcattcatccctcacacacggtgggggaggaactgtgttgtaatccaggcaaacctgctccaccgctcacccacctgcacatggcaggtgtatgtaccctgcatctttaaaagaaaggctcgccgggcgttggtggcacatgcctttaatcccagcactcaggaggcagagacaggcggatctccgtgagttcgaggccagcctggtttccagagcaagtgccaggataggctccaaagctacacagagaaactgtctcggaaaaaaacaaacaaacaaacaaacaaaaaaaaaggttccgcccacttccgctgtctcctttccctctttcctgacgtcccccaggcagacaggactgtctccctcttctcttctgtcctctctctatctcttctcttacttccccatcgataaaactttgaataagtctcgtctacaggtctctgtttccccatctacctgccacctgtcacccacaatccacgtggtcacagcccaaaaccaggaacctgccacctgcggccccaactcattattcattttgagcattttgaaattgactcatcagtcacgggtcagaccaacactgcaatgagtctgaaatagaactcctccgagttgacaataacacctgctgtagcagctgacacctgctcaacagactctgccaggcaccgtgagcaccttcctatcacggcgatgtgctccacactgtcacttgggatgtgagatgtcactgtgccaacttaaggacacggtggcagtgatgggcaagtgtgggagccggcctgatgcctgggaatagaggggagaggaaaaaggagaccaaagctccagacagcacttgcaggcgggcctgctgggggccagctggcaggctgggtactgggggcagctgggccagtgtaaaggttgccatgagtcatgggtgcagcagccacaggcggtcacagcagcttctccatttttcttgtcagaaacaccttactgagattgaggtgtaactggcatccattaaactcaagatactttgaatataaaatggggggggtatatttatttttaataatttatttgtattttatgtgcattggtgttttgcctgcatgtttatctgtgtgagggtgttggatcccctggaacaagagttacagacagttgttagccatcatgtgggtgctgggaaattgaaacagggtcctctgaaagagccgctagtgcttttaatcactgatttatttttaaataggggctaagtagtcaaggttggccttgaattctagatcctcctgctccagtttcctcagtgctcattttatttttattattattactttttgtttgtttttttgtttttcgagacagggtttctctgtggctttggaggctgtcctggaagtaggtcttgtagaccacgctggtcccaaactcagagatccgcctgcctctgcctcccgagtgctgggactaaaggtgtgcgccaccaatgcccggctatttttattattttttaaattaacttacgtgtatagctagatattccaggttcctgccttgcttgagttcctgccctgtattttgatccaatatgtcacaaaacaaactgctaaaaataagctcacacaagttaattcaacatccaaaaatgctgatgaaagataaactcagggcacaacactacatctttcagaagatatgaccattggagttttattatgggctgtaagaattatcacccaggttattgacagtcataaagagaagatgtgaatgagaaaaaggtcatgttccctttctcccattaattctggagaacatacagccaaaaaacttaaaactacgaaagtagtatttgattgtgctttcccagatcaaaaaagcaattttaccatcaacaagtagcttagtgactcatgcaataaaaagatgagaaaaataataaaaacattcactttcagtaaccctagactcacttcagattaaatgaatattgtatcacctagtcaagaaatcaaaacaaaccaggtgtggtggcccacgcctttagtcccaactcttgggaagcagaggcaagtggatctctgtgagtttcaggataaccaggactagtaagaccctagctaaagaaagggaaggaaaggaaagaaagaaacctacacaataaatttaaaacttcaacaaaacagtatatttatattttatttactgacctcttaagactaaaattctaaattaaagtgttattgaacatgacaaacttttacaaaaaaatactttaatgcaataccttcactcttgagcagacaacatgggacattacatttagatggtaaaattagattacaaatacaggttaaatatgaaatagtagacttctggcttattggagacctaacagttctgagaggcatgctatgcttagtactttagttcagtctgaacaccccttaactcttccgagagacttcgggtgggaattacgtgatgactgttctgcgtagggtggcttcagcacatcacagagaccgtcatctgccagacttagtcactcactgcccagccagctgatgctaccaatcctttctattcaaacacagtttgaacctggtaaggaaggagaagcaagcttgcttttcacaatgccgggtcaggtgcactgcagagcagtgacctcagctgccacgtttattataaatggcacaaatgttatgctccaaaagaaacataccaacacagcaaaaggttacactttatttcctcttaaacacaatctagaaagaactaacttttcttgttaattcaacaaattactgatatgaatttaccagaaaaataattatatatttgcccaacatcaaatgatctgcaaaaatttctagggtatttattcagtttccaaaaataaaggttttgtaactgcaagcagtgacattcccactctaaagcaagcctcagagtacaggctggtccctcagctctcaacagctcagttacataaatattttctttccaacgttctcagtttcaaaagctatctacttcccaagaacatacaaacagtcttcatttcaaaccagtcattctgtttccatggagacagtgcgggattccttggccaccataagtcgcattagttgactgtggaatttctcaatcttctttacgtcttgagcttggtctgttctgtacactaaacactgtcagaaaatgtaaagacatacaaactaagcaaagctagatactcgtaatgagggaagcaggtaagtgtctgaacatctgggagtcttgtctgcccttattttgctctattctctctggagtcacactgagcatccaactattgctttcccaccgttattttaaatgccactgctgcagatgaaatgtaaacactcttctagaaacatctcaaaaatggcaacctaaatcctgtctgtaagttccaggggttccagctcccctcttctggtctccgaaggtaccaggcatgcacatggtatacagatacacatgcagcaaaatacccacacgcctagaataaattaaacacataaagttgaagatcattctcagctacatagcaagttcaggccagcctgggctacaataccctcactattaagttggatttatatatttcctacttgagagaacagtctcttacctaatgcagaacctgaggatgacatttaaaggatctttttttttttttttttttttttaaagggagttaacaatcaggtttgcacttttaaaaatcattccagcagcgttagagatatgctcaggagtagtgcatatgtagatatgtagtatgtgggtggcccttggaaaatgggagggaacactctctctctctctctctctctctctctctctctctctctctctctctctctctctctctctctctctctccagattaggagccttctgttttcctccacagagacaatgctaataaaccaagtaaggaggatgctcctaatctgaggagagcatccatgaagatggagagctggtgacaacaggaaggggcagaagaggcagcaagtccagatgcctagccaagagtaggtacggcatgttatgatcaaaatgccactttccaataaaccaacagtaggcatagcaacaaaagaagggaccaaatattgtccccaggattctggccaggtgggtggcagcacgcctaaccagatgagaaggaaccagatgaagggctggtaagggtgcatgaagtaatgttacttgactttagctttagagcctcagaagaaaaagagagtcaaatacaccaatctgtaagcagacacgaatataggaagtaccaaactgcaggaatcgaatgttctggaagaatcggtaacaaaaagatagccaaggcccgaatactggtaaaacagggtatttacagggaaacatctagtagttagcaaagacaggagcacagaaaagcaaggccaacataaagtaaagctacaagggctaaagccatagagaacggtctccataccgcaagcgacagagatcaaatggacatgatcgaatgagagcactgggctagagagctcatcccagcactgtggagctcacaacagcagcagcagcagcagcagcagcagcagcactggtagagaaggctgcacaaagaaatcagccaaagggagggatggaggaatggagaaacactaacaagcccctgccttggttccaaacacaacacttatggagccaggcaaggtggcacatacctctgatcctagcattctgtgagctcaaggccaacctggtctacacatcgagttccaggacaaccagagctacagagaaagaacctgtctcaaacaacaacaacaatctacatacataaaaatttacttctcaccacgagaaaggaaacctgctcaattttagtatctatattcctccggcataggcctgaagaaacaactgtcaggccactgctggcacactgccttcatgaagcaagttcagttacttcctaagtctaaaagaacagctctaagctgagcagtggtggcacatgcctttagtcccagacttgaaggcagaggcaggcagatcttggtgagttcgaagccagcccagtctacaaagcgagtttcaggacagagctatacagaaaccctgtctcgaaaacccaaaaagaactgctctagaatgaagttctttactatggcatgcatgcacagcaagtaccctagataggtcacctgcacaacttcaagaaaatggtcaactcagactcccccccaatgcaacaaataaaaatgtatacttacaactaaatcgtctgttactttgatacacaaattcccatcaacatgcctgtatttgagaaccacacgtacctgcaataaaaaaacttattttaaaaaagcaaaaataacagattgcactattcataaacaatttagtcagtgggagcaaaagctctttaggataaatgcccggacacctgaaagtgctttcactgcatcctcttctctggaatgaggaaaaggggaaaagccagccattagttcaattatatctgttctatttaaactttaaatagatgtatgcatatgatacatgtgtacacatatatgtagagctatgtgtattgacgttaattaccaatatgtaatcaggtaatggttaggatattttatttaggggaaatgcctcacttacagagttccctagccaaccggcaggaaagcagagcaagctgaagcagaagggaaaaaagccctgacgagcgtggtcgggcacacctgtagccagcccttaggtggttatagtgtctccctacactatgtgcttattcttcactttgttttttaaagattatttttattttatgtgtttagacacttaagtgctttccctgcatgtatgtctgtgcctgagtgcctggtgcctgcagaggccagaggaaggtgtaggagtccctgaactggggttacagatggttatgagctaccgtctgggtgccaggctgaaaaccaaacctgggtcctctgtaagagccatcttcccagccctgtccatttatctcttgagagagggtctctcaatgaagctggagcctactgattggctaggctggtggccagtgagctctggactgcttgtctccctcctactttctacccagtgctagagtcacagatgaccaccatcccacatgtacaggggtgctgaggatccaaacgcaggtccttattttgacacagcaagcgtttcctcacagagccatctccccagcccctatttaaaaaacaaacaaacaaacaaacaaacaaaacccctttgtttctgaagttgggtgttgtatttgtagtttgaagaaatgtactaaaattcccaacacacacatcaaggaatgtctgaggtggcctggcactcttgtcagtcaaacaaatgaaaggagggggtggcagagagcagaaatggctgaagcccaactccagcccaggaaacggtgctgtaggcagtccactccgccttctacttcccctgtgcaccctccttgggaagacaggtccagacttcccagcacatgtccatctttatcatggaggcaaaaggaggctctgttaccttgaagggagtccccctggaaggtctccatgtcttcttccaaaagccaggatcgctcagaacagtgagcaccatgtcacaggacaatttctgttgctcaatattctacacttaagtagccatgacttaatttggctgtcaacacatccctctacaacaacacccaaaatccaacttctgtgagcactctctttcagtcactggtgaatgcaattctgtgcgcactttctgtcactagtgaatataaacagtgacaacttctgtgagcactctctctgtcactggtgaatgcaaacaatgacaacttctgtgagcactttctatcactggtgaatgcaaacacagtgaccgaagcagtcggtgctttgctatcagtaacccctgtttaagtcactttaaaaacaaaacactaaggatcacccaccctttcctgttccctgagcccccatttccaaaagcccacaaatttaaaatgatttcagtgtggcaccctgtagcttgtccgactgcactgtgccctgctgaggttataagtgttatacctctaagaggcttgtcttcctgaggacagaggagaaacccagaatataaaatagctacctatgtttataatacttgacctattcactgaactattaaattcaatactataaatttttaaaactttgtaggaacaaagagaaaccaaaatttaaaagataaattaagcaagacaacaaagtaggattttaactgtgagccaaaaaatactgtttttacagggagagtttgtgggactaatgctgctgtaaatatccattttcaactgaatcacagacacaaactcaagattcctgtccacttaaggactctgagttcagcaagccaaaatgatcagatacaaaacagaatgaactaaaagtcctagaaagaaaagtactggtaaaaatactaaagaagtttacactgggaaagggcaagagccacttttcttaggaggtagttttgagaaatacatgttttctttcctatagagaaggcgagaaggctggagaaaacacaagcagcgttctgaacaaagatcccatgtactctgtggcttcaccaagtcgagaactgagaactatggggggcgggcagaacagcagagtcaagacagtgggctgggagctgggactttactcagtaatctgaagagctggttttaagcagaggatacttcagtgtctctactttcaggcagctgtggcagaaatgtgaaggagggactaaaaggaagctagacccaactaagggctctttttcagtccactggtaggttagtgtggtaaagatgagaagctatgtatgggctccatgttatatgcactgggagagagggcagaatcttagcaaacatttcagacacctggcaaactgtcttctttagccctacatggatcagagagcctaggttcagaactggggtttgtaagctctcagagcaaacaccatcttggaactcagaacatggttcatgctctatagccctctccagttgggcaaaaaaatgtgaaaaactaacagaaggctacaaggaagcagaagtttgtaggccactagaattttctacctaggtggaaatgtaaggttcctcctctcctgtctattttaaacatgttttcatcaccacaattctgtcacttgtattttcatttttcctacaactactgtattcttaaaaatacagtcacagacactctgtgtgctggtatattctttaccattcttttactaaattaaaaagtgtatactgttgccatcatcaggcacgttgctcaactgaagaaaaggcaaacaaatggcaacacaagggaaaggtgatgacccagatggagtaccagaggccgcactgccaagcgacgccatttcaaaagcatccaacttacttcactcttcatcatcactttctacataaagcagatgaactgttacgtcaacttaagaggaacagaataattagttttaaatatcaccttagaagggaggctggaagaggattatcttgatgaggctggcctgtgggcgtgtaggggaggcctgcttcactgaggtgggaaaattcaatcaactgtgggctgggccctcagctgtctgtgcagaaccagctagtaagaactcaggagagcacaagccagcaggcagcatggtgttccgtttctttctctctgctttggactatggacatggtggtttcaagtgcctttaacttagtaagccaaagaaacctttccctcccctgtactgcttgtcaggtgtttcatcacagctacagaaacgaaactagaacaaatggcaccacaaaaagtcaggaatagtggtatttacctataattccagcattcaggctgctgcagaggaccttcaattcaagggcaacttgggcttaacaaagcaatacctcgtctcaaaaaatacagaaagcaaaaaaagaaaaaaaagttagactagaaagatccagactttaagatcatcctcagctacacagtaaattaaagaggccaatctgggctacgtgagatgagaacgtcttaaaaataaacaagaatggatcaaaatgttctactgtctattcaggtcctatggttcctccactgcgccttcagacaggatctcattgtgtagcctaatccgacctcaaattccctcttctttcttcagcttcctgaatgctgggcttacaggtgtgcaccaccattcccttcttggaccaaagaccatttataacagcaacttatcttgctgcagttggacacaaatttggttcccagtactcacatgatgggtggctcacaactatccctaactccagataccctcttctgacctcagcaggcaccatgcatgaacaggatgtacctactgtacaacactgtacatataaaagttaatgaattaggagctggagagatggctcagcggttaagagcacaggctactcttccagaggtcctgagttcaattcccagcaaccacatggtggctcacaaccatccgttatgatatctggtgccctcttctggtgtgcagatgtatatggaagcagaatgttgtatacataataaataagtaaataaaatctttttttaaaaagttaatgaattaatctttttaaaagatggtggggggggccgttgtagtaagttctgctgtcacaagttgccagcaccagccagatggtggtggtgcatgcctttaatcccagcacttgggaggcagaggtaggatctctgagttcaaggccagtctggcctacagagcaatttccaggacagccagggctacacagagaaaccttgtctcgaacaaacaaccaaacttgaaaaaattgccagcaccaatgtatttttaaaattttttacttatcactgtgtgtgtgtgtgtgtgtgtgtgtgtgtgtctagaggacaactttggggagtcggttctttctttacctccttatgtgaactctgtatgctgagcatctccccaaactcttaacaactagctttaaaaacagtttgtgttatatgctggtcattagaaatgaccccgagtctactgttaacagctcctcattttctttttcctccagtgggtacattcacaatacactcggacaccgtacaatcctcaaggaatagtggcatttacctgtgtgtgtctctcataggacctattctgaactggggagattcgctttggagaatgaaacaatttgcaaacacttgtgcctggggtgtaagtgcatgcactcttaagacttgaaaacgaccactgacccacagaaaagactaagaatccccgtcaccctggggaatgggggcaggtgctccccaatgtgcttccaaggctgagtggcggtgtaacattagctccattttataaacagcaggaaccctcgcgcctttccaggaagggacaggggcaccgaaataagtgacggacaggaaagagaaggtgcagggggaggagccccagcctcagcgacacgtccaccgaccaaagccactgcggaagtcaggagttcccgcgggtgaggccaccgcagggcccgccgcggaggaggctctgcccgggcacacggccgcagcctcgctgggtcccgaggccgacggaaggcgacgggaggcgcaccgaggctcgagggcagacgccgcttccgggatgtgcggacgccgcgccagaggcagagaagaccccgcctcggggccgccgcccgccactcaccttcatggggtcggcgaggtagagcttctcggccgcgcggctgaactcctcccaggtctggaactgaggcatcgcggcggcgcggcggcggcggcggccacggagggaaaccgcagtctcaccggcagcccgcgccctcctgcaaccgcccacggcgcagcgctccggccgcacgaagggggacgcccaccagcggccgcgccattggccagcctccgccgcgccggcccaatgggcaggaggcgttgccgccgggggcggggcctccgcaaagagaagtcgggagcccggagaggatgcggctgccacagcgccacctgcagggctggaggggcggtgcctgggcacccacgttaagggtaatgataaggtccaggtgtcacgctcacagcctaatcctaacccctaaggggctggggagacaaaacaggagtgcaaacaagaactttctgtgatagacttctgtatcggtgaaatggagccaagaggggagagaggctcgcagaaatattacaagccaagcaggcaagcagagaagggcgaaacacctaagcgcattttagatcgcggtgtgcttaatatgaccagtgttcaggaaagggaggaagagaagaagcaaggagcggacatctgctaggatatgaaatttgagcctgggcgccgggcggtggtggtgcacacctttaatcccagcactcgggaggcagaggcaggcggatctctgtgagttcgaggccagcctggactacagagcgagtgccaggataggctccaaagctacacagagaaaccctgtcttgaaaaaccaaaaaaaaaaaaaaaaaaaaaaacccaaaaacaaactttattgggatatttttctgtgcagtgaacactgtctttaacaatatacactcatgaattttgaaagagtgcatacacacatcgcaacccacgcctaatgtcataaccaatgtatgggacatttttcacctccagaaatctccttcatgcttccttctatccatttcctctctcctcactcctggtcccacgaatatgctttcttttcctataaactgcttccccctttcccgtgaacgtggtttttggttttgttttgggtttgcagtgctggggatggcacatgctaggcaaggtcccttccactcagttataacaccgacgactttctcctatcttgcctcccctcctccttttcttccttcttttttttttttttgttgttcatttgtttgtttgaaacagaatctctctctctgcctcaacctcttgagtagctgggactgtgccaccaacatatacaaatctttatgtcatgagtttgaggacagcccaggctatttggtgaacccaaggccaaactgggctacctatcaaataaatagcaaataataagaatgacgatagtcctagcaagagacatcaaggaaatctgcaatcaatctaatggctggggtggggtgtggtgtgatatttgaagacctgctcaaaggttagggttttatgttccaggttccaagaaaggctgggtgttagttgagtcatctatacaaacgcaaagtcacacatgaatacgaaagggattagatgcctaagaaggctctgaggcaggagcccacatccttgattagtgcaagggacttatatgttgggcagtgggagccataaagaacagaagcaaaagagacaaagtccagtgaatgaccctccgggaagaggagttttaacattttagtagtatacataataacaggttttattactgcattttgatcatattcaccccctggtgccccagatgtcttagattggtcccgcattctctcccctgatcttactaagccctcttttgcccatgcaaatgagtgaaagggcatagagtagcactgggcatttaatccaaactttggagtcctaataatgctcagttgcttatctcttcatggcagaatcaacaaaagcagacttcggagcttactataaaaccttgaccctgggcggtggtggcacacacctttaataatagcactcaggaggcagaggctggcatatctgtgagttcgaggccagcctggtctacagagttccaggacagccagagctgttacttggtgaaaccctgtcttcaaaaaccaaaattagaaaaagaaaatcttgccaaagtttaaatcttataaccctaatgccaaatcttactgcgatgctgatttgacagggtttaaatcacctagtagacaaaccactgtttgtgagagagttcctaggtaaggtaattgaggcagggggacccatctgaaatgaatggctggctctattccatgggctggggtccagaactgtaggaaaaggagaaagtgagctgggcgcccttctccgtctctctgcttcctgactggatgtagtgtgaccagccacctcacattcctgtaccccaaactgagcccaaataaactgctccttccttaagtagctttatcaggcatacagtgagaaaagtatccactaagataaccccaaggactccatgccattcccgaggaacagtcaacctccctgctatgccaacccagccagattcgtgcaattcccccctccctgagctgagactccttggtcatgaacagcagcagtgtgatggaagttaagacatagactttcaatgtgcaatcctggacttcacagatggcatagagtctgcaacattgtaattccacatctgtcccaagagcagagccctctggctggggtcaggaatgagacctatttagcagatccagcctgtaatttctatgtgacccacaaccacgcagccatctgcagggaaaggccccccccttactgcctgtaataccttggttaaacatgctcctgggatttggacccttccagaagccacctggcttctaactcaggtggccctcatggaacaaccaagcagatcaacagactaaacgggtagctaagcctacatccccaatcccagtctcccatgtccaaaatgtatgcttccaaaggcttcagaccagagctccacaaccactccagaggcatagttacaaaaccttggaatcaagctattgctccctggattctcccagggaaaggcccttaacagttcttattaggccatactatttgagggctgaagccctcaaattctagttgaacctatcttcacagacacagtgttcctcagacgttgtcatatgtttctatagcttgccctatttgtcatgccaatctagatggggtccttaatcctgctccccttttccttctgttacagcaaagaggaactatgccaggagaaggttggaaagtggacttgacttccatgcacccatgcaagggatgcacccgtgcaagggatgcagacatctactgaacatcttctctgggtagataaaggcattttccaccaaaaagaaagagccccagaggtagccaatatcctcacagaatgcattattttttgcttgaggctttcccactccctatagactaacaatggcccagatttcatttcctatgttcccaccacctggcacctttggttttctgcaaaggttgagagggctaatctaactcttctgtgatttctcaccaagcttccactggaaactcaataatcttggcccactctcctcccaatcccacccttaagatctcaaattgcccccaagactgccactctctcaactctctcatagtcctttatgatccgtcttttctacatgctgacccctcccttattaaatcccaaggctcattatcaatctcagtggattatattctgcacacagacaatccaagccatcactgtctactggggtataagcagcctcaagcttgaccttactttttccagatttcatcctgttgttaacccaggggattggggtttatttaaaaacccttccacaaaatgaaagaccgcctgaagctctctggcttaaaccttaccacgtcctactcatgtctcctgttgtagtcacagcacatcatggctgcaccggctcagagttgagacatagctccatccctgcaagctccaaggacctactcccttgagcctcttggagatctccatctcttccactgagacccaagagaaactcactttcaaacactgttcattttttccttcactgtgaaaatacccgagaaaagcaacttgaagaaggaaagagtttactttggctcagaagttgaggatacagtgtgtcacgatagggttgtcatggcagccgctcaattccgtccatgatcaggaagcaaagacagatgagtgctggtgttccgctggcttcttcctttttattcacccaaaactacagctatggaatagagccacccacattcaaagaggttctcccctgaaaaaaaccctcatagtcatacctcagggagtgtttctatgtgattctaaacccagtcgagttgacaataaagttttactatctcaagcacctctagaccctagcaggtagccaaggtgcccccctcacctcctgagtttgggggcataattttgcaagctctttcctcttattccattgacatccaatccaatctaggaaattcattcaccttaggcttctagagtattcctgacaaaagtcaccaattatctgtaattatggcccctctttacccccttacaccagtgccaatgggctctcatactgggcacagggcttcctctgatccttacagttaatattgctgtggcagaatattcgtttaactatgcaaagatgtgttgcatttgcttaactatgtaaagatacattgcatttttatgttgtgcaatatttgtttaactacataaagatgtgttgcatttatttaattatgtaacgatatctaattatataaagatgtgttgctgttttacgttgcctgcctaagccacctggttggtctaataaaaagctaaatggccaatagcaagggaggaggtataggtggaacttccaggcggggagaataagaggcagaatttaggctgaaaaaagagggaggagccgggcgttggtggcacacgcctttaattccagcactccagaggcagaggcagaggcaggtggatctctgcgagttcgagaccagcctggtctacgagagctagttccaggacaggctccaaagccacaagaaaccctacctccaaaaaggggagggagagaaagggagatggcagggagacgccagggaccaggcagccaggcctggaggaagcaggaaagtaggacatattcaatgaaagaaaggtaaaaggccctgaggcccaacgtgggtgaatagagacaggttaaattaagttaaaggagctcgtgggacaagcctaagctaaggccgagcatccacaatgaacaagtctctgtgtctttatttgggagctggttggcagcccacagaaaatgccaactacatattgtcataattctcatctgcatcctgaaattacctatgtttctataatatggtcatgtctggcccagggtttagtagctttgccctcatggcaaattgccctggctccatgatagccttctctgcctcccctgggcattggatctgtccccaaagggattccagatctcaagttcacagctgagattaaccatcagtttatattgattaggctaattgaggtgggaaaccactgtgggtagcatcattccctaggctaggctcccagactgcataaaaaggtgtgataatacgaaccttaaatctcaacactcagaaatcagaggcagtcagatctgagtttgaagccagcctggcctatataatgggttctaggacagccagaacaagagagacagacagacagacagacacagacacacagacagacacagacacacagagagagagacaaagagacagacacagaaagagagggacagagagacagacacacacagaaagagagagagagagagagagagagagagagagagagagagagagaggcagacacagaaagagagacagacatggagaaagaagacagacacacacacacacacacacacagagagaaacagagacagagacacagagagacagagggagacagagacagagagacagagacacacagagagagacagaaagacagaaagacagagacagagacagacagacagacagagagagactttcaaaaaacaaaacaaaacaaaaaccaaaaaagacaaagtgatcagtgcacagcactcattatcttctgtttctgactgtggaagtgatggggccagctatagttggactgtctttggatagccagctcctgaaaaataacatggagactttttattaattatgaaagcttggccttagcttagacttgttcccaactagctcttacaactttcatgtaacttttattttatgcaaccctttgtattaatctatcttctgccacagggcttgctatctttcctcagtacagtacatccaactccctcccctcctcaattagcctaatcaatataaagaatctaagaggctggccaactcccacctcttagattctttcccccagttcctctctctccctgaagtcccacctatggctattggccattccgccctttattaaaccaatcagaaggtgcctcacccaggcgagtaaggacagacacatcttcacacaatgagataaaatatcctgcaccagtcagccaccccagaccgccaccacattgacttccctgccctgatggaccaaaaacttaagctgtgagccaacctcatcccttccttctttaaggtgcttttgtcatggtattttatctcagcaacaggaacagtcactaatacagcaggtaagagaggggatgagaggctcttctctgtaaggtatgaagggtgactgggactcttgtctcttggtacttgccccagtatgcacgaggtcttgggtttcactcaagcactgcaaaccagagaagaaaaaaaaaaaaatctcaattgtttttggagtggagcgactgcttctgagctcttctctttgaacgtttgtccctctctgtttcccagggtttgtcttccgcaaacagggctgcaactgttctagactaagaacaggtggggatccttacatgaattcttcctctaatgggcattgtaatagtcccaagtgcacctggcatgccaagaatgtgcgtggctatgtttattttcccgaattaaatatttccagagcccgctatgtgccagcagcagtcaaggaaggctttgtccttcccaggttccatggattcaaagtgaggcaggccgggtaaacacctgctatgagaagtccactgaaaaacctgtttgtccggaatgcccttgtcccaaggaaggaggtaaggaaacctgagcgaggcctcacagcagaaggacttagggagccgcggctgtgcccagaggagggcagtggtgcgcagtagacccaagccaagtcctggcgcagatctcagcccttcctgaagagagagagcaggctctaagagcaggaacccagctcggctgcaggatgttgccttttgttcagaatccagggactgctgagtgtggacccgtggagatgagccttcggtcgcctcccaggagcgtaggcttctgaaccttctcttggccctctgtgcacacacggacacttccatgctgtcctgcctggtcaatggtttacctccttagtcacccaaccaccaatcccgacacttcttttcaccagaaagcctcgaccaggaattcccaatccagtattaattacttattaagtgcctactcctgggtctgccatccatccaagtagtcaaacctcagagaatgcaaagaggcgcaccagacgcttacaaactaatgagagtcaaattcacctggaagtcgaaatgcgcatcgacggagcacctccacgagggggcgcacaacactgatggttccacagaggtcttaacagttcctgcctgcctaggtgtttgggaaccaggacatcaactatcagtgtatgtacaaagggccagggaagatgcacaaggctgatctccaaaaacccacattcagtagttcctggatttgattgattgattgattgattgattgattgattgattgattgattggtttttcttgtgaaagtggtgggctatttgtgtttggtttttttcgagacaaaaatcttgatttgtagcccttggctggcctggaacttgtggcaatccccctgtctccgcctgctaagtgctaggattacaagcctggcatgtttttattttccagtgctgacgataaacccagggtgttgtacatgaacaggcaatttctctatttctgaactatacagccaaccagatggctcactcagaaccctggagccacctcaagagtgtattgagactgggacgggaagggagtggcaacaaggacagccagcataagagtcttcaggacacccgagcccaggggctagggacagactggcgggactgcctccacccgcctctgagacactccaggtggtacctcagggtcctggaggctgcctccagccgttcatcttggaccccaccctaagaatgctgacatttttatgacttggaacagatttcaaacagaactaagcacacccccaaaacaacaggagaaaaagccttggagtgttttgtttagtcttgtttgggggtgtgggtttggtgttttcccaggggtcttgagcgcaaggaggtcctgactaaatctcagagaccggcaaggccaccctcagggctatctcctttggtgcaagctgcttgttctagagactggtgtcaaaggtgaggcactaagactcctgaggcgtagctcacgggtttcatctgcgtctgattaaaatgaaattcaaatcccagtagctggaagaaaaggtcgggatttgaccctggcagtcacctcccttcagtccctccctcttgttctctggcctgggtcccatctctgctcagctccgatttcccctttccctgggtagccccgcactgcccaaaaatcccgcagaatggtcccattgtagggccacacaaccaaaatagaagcattttctgtcctctgccttcgggagcttcacttaaaaccccaaagtcccagatgtggacgacaatggaagttgttgttgcaaattcgcgcttctggaagtggtgagaggcaggtagtcggaaggcagccagtggagtgggctgggctgtgggagagagaacaattacacagtcactccattaacccaattagcaaaccctggcaggaattcccttgtcaacaaagaagcatggtagggaaggtggggacaggggagagggtgggggggtactcctggaacaaagggactgagcaaacttcagttacctctatactgacaaatgctatttttaccaaatgttaaatattctgggttctttttttaaaccatgccctggagcactggatgaacagtgcttgctttaattaatgaatcagatgacatctccactcagctgtggaaaccctctgggtggtctggagaacaggggctctagaatcctgatagctcacagctgtcaagtcattggtcattcagtccaaaaggtcagtggacccttccctggcatcttcctggtgggagagctttcttgggtttgtggggagaggggcagggcacagagtaaggccatggcagtgtttggtttttctgagtcttttggtacaagctgtgcaaggagctggaatctggagggaaaggcaggttatgccagatgagatggtcaggctttctgatacaagcaggggtgacacagcagcagacacagctagcgggaataccatgataacctcactggcctagataaccttttggcaaagccggccttggcgtgggcagagagaactggaactgagctgaggaagtggggctggcctggcagcacactcagaagcatggtctgtggggctgcagcgtgcggcacacagagggagggctaccaagtgagagaagggtgaaacctcttattactaggttctctgtggctgtggaggaacagatgaacaagataagtggatgggatggttgtgggtagggtctgtgctgtgttgcctcccccattgagcctgacagcctggtacccagttccccagccctcctctgtcctcatcaacatctccacccagttgctccttggcacctttcccttcttcagatcacccatcagacgggaccatgggaacagacagtcctgtcctgttagtattcactagtgcccaagatggctgtgcatggaggaactaccccacactcaagggttcagggaaacatccctcttgatcagactgagagaaaatgtgtggccctggagaggttgacttgaacatatgcactgcgatccatgggctgtctgcatgtgtgggtaaggcttgtgaaccacatctgctttgcttctcatggcacagccttccatctctgtctccgctgaaacccaggctgctagatgtcctcctacccgaatcgaggctggagtaagtacatggattaatgcacagcctataacccaatggttctcagcctttgggcctcgactctttggcaaacctctatcttcaaaaatatttacatcacaattcacaccagtagcaacaatactgttatgaagcagcaacaaaaataacgttatggctggggatcaccataacatgcagaactgtattgaagaattgcagcattaggaaggttgagaaccaccgctataacctctgaacccacccacggcactaactgttctcaggactgcatagagtcagccagtttctgttcagttttcataacttggggctgcaagattggagccccgaagggtggccccttggtttccctcacacccctgcttggcaagttcaggcccctgaggcaactgggtttttagaactgagtcagttttgtatcagtcaaaaagccctagcagctccaggcaccctgcaagagtgaggagggcgctctcccatagcccagtagaagatgctaaacaggtctcaggctaagctgtgggcagaggaactactttgaaagacaaggaggtagggggtcaccccaaggttctctgagaacactggcttgcgcctgccagcccctggcctgtctccagctgtgctcagctgtgaggctcatacaacctcagctctaagcaagccctgacctaggagctctcactacaagcacaaacaggccttccaggtgccttctaacttcctggggtgcggtgatgggggccagggcaagtatgttgattacccttgtgtcatcttctggtgccattccaagtgcctggcaccaccatctcccctccatccagttgctgggactagaggagctcagggaagagcagctttgacgctcatggaattggcctctagtgccctccctgcttggtgttgggaagccttatggctgctctgggatgcggaatctacctttcccttgtgccctggggctctttggatccaggtattggtgaagcaaagttttggcaagagccttgacaactgctgccaggagagcagccgaaggaagataattagacctggtaattggttgccccaccccccagccccatgcaatagtgactatgtctaaaagacaccagaaagctattcccctggaccaaaactaaagtgtcccaatgctaggtggagctgttggcccctagccagtctgacatttctcgtcactcattagatggctgcagaatgattcattaaaaaaaaaaatatttcaaaatgtatgtgtgtgtacatgcacacaggtatatgtcacacatgtgaaggtcagagaacaacttgctggagttggtccttccttccaccatgggggtcccagggatcaaactcagctcatcaggcttggcagcaattgcctggcccactgagcaatccccctggcctgctggaatgcttctcaaactccacgtgcttccttctccaaagcaatgcagatttacctaactgtggtcacactcagggaccatgagtttttaccactctgtatctgggttcacctttagatggagtcctccaatcctggctgctcaggaaggttctgtgaggcctcttccaaaccctcaaaggcttttgttctgggtgagccgagccatcacttcctacttctgggaaggttccagacctctgtccctcctgttggccatttcagcagaccagatggctcatattagatctcaatttgcagtttgcaaccctttgtgggcacgtgctttgggtctgtcccagactgagcagctggtccctcaggggatctgggaagtcctcaacatggattctggctcagcacagacaatacgggtctcattcccactttctgtggggcacttactattttaaattctgaccaagaattatagccccagaacctgaagacagctcaggtggggctctgccctgcactgtcctcaagcccaggacaaggtctgtggaggagtcaatcctagaaacaaatggactgagctggaatgaagactctgtttttgttgctgtttcatgtcttatgtagaatcagaagaaagacttcatcagtttaactctgagccttttgtttgtttgtttcgagagaggttttctctgtataacagctctggctgtcctggaactagcactgtagaccaggctggccttgaactcacagaaaacagcctgcctttgtctcccaagtgctgggattaaaggtttatgcctaaactagccttgaacatctcatctccctgcttctaccttctgacaactgcaaagtttgtgccagcactctgggttccatgcggctggggatagaacctaggacatggtacctgctagtgcttgtgaagggacaagctccccggtttttggcagccataacagcctaacactcgtttgcctgaccttgccttggtcactaggaggtcagatgcctgcctcatggcaaggagccaatcagaagttagctggtggtgctatgctttatggctctgggtgtgctttacagacaagtgcaaagcaatgatgcgcagagcatagcaaccaccctgggagggcctatgggccataacaaccagttgaccaatcagcatcgggcaaaccctccaagcctggaggcacaccaatcctgagcctgtttgtacccctagacactccccttacgctgtcctataagatctctgtcctgtggtttctcggggtcttttcccagccatcctccatgatggatgaatgaaaaggcccgagctaacggggtagctcgttaaacaactacaataaaagcctcattacttttgcattgaaatgggcctcttggtgatttgttgttcagaatttgggcaaaacacttgcctgctaaacaagttttccaccagccaccggggctacatctaccaaggctgtatcttcagccctgggagttttgtttggtttgtttttcatactcagtgctggagctttaacctatggcccccttgccaagcaagtgctcttccactgagtcccaacctgagctcagctctggggttttaaattttagcagatggtcttcttcctcctagcttcctttctcatttagctatccatgcatttgttttttcagtacatagttactgatcgtataccctgtaccacatgtcatgcttagggctgaggaataaggatttaaaaaaaaaaaagttcttgccttcaagggacttcctgaagtctgagaagcaggctcttgcaaagaagtgaacatggaggtgtggctcagacactccctctgctgcttgcaggcatccctttggaccaagctcctaagcactatccactacagtttcctcattgagaaaggaaataatgccgatacctacctcagtggtttctgagaaacacattagttgatggatttcaaatgcttagaaccaagtccatggataatgaggatgggccatactccagatgcttgaaaagctggggcacaaaagggctgaagaggaaggggggggtcacatccacaccccaggactccaggactccgagaatgtcagcaaggctgtatttgagtcttgggtcggctgcaatgtaatgtttatttggagttttgaatccccatgaccctggcttgctcttctgtagagacagtagtatttccacactccatcctcattgggaggaaggaaatgaacagtgtttacagctcctttgtacagacacagttttatcctgagaataggaagaaatagcatcttaaatgtatttgaagattttaagacattctaaactgcaaatcataacattccaggtaatctccattacatcttgacttctctgtccctcgggtacattccgctgatgactgagagatgaggagaagggcaagcactttggtctaactaataatagccattaggaccttgcctccttgcaattgtccctgtatcccttttactactctactaaaacctagagacctctttagaaggagatccaaaatcagagaaaaggtacagtgaagagtgccgagctcctgggggattagataatgccaccagataggaggaacatgtgtgcttctgagaaagaaccatgtcccaactgtgcagcaggctcctgtccaccctcctgtgccttgggagctgtgcaaggctaacccagctcacagccagagcttataactaagctgggtaaggaggcatgagccaccccaccccaatgtttgctcactctcacaggctgcgtttccatgtcctggagacttcttggcaaggggtacagagcttgccaccagattaaggccagctagcaacaggatatcaaggtggagtctacgaaatgcaagcaggaggcactggggtttgttccagtggctggtcactactagtgggactgccactgctgccaggagatctgccaggaagttgtgaaatggagcctccctccagagccctaccacagagccgggggtggggggtggggtgggatggcatcctgatgcttctgacatcttgatgccctccatcctctacagcgctctacacaagattctactggtgctctggctgttttctcacctccccccacacctttgctatcctggattggaaggtgtagccctccctacctacagccctgagcttccgatgggtctgcatgccgctagagttcccgaagccttagccaatgtgagccccgatgttcttggcttattttacaaggcttttgtgaggatccaacatcaaagaaacccttttgcaacgtgtaagatgccttgaatgggagaaattgctccaggcacaaaaggagaagcccagaggacaagtgttgccaagcagagccctatgggcctggctctggctattccaactggcccatctcctggggacagagaaaagggacctttccaagggtcttcttgggagtcttgtgtcacgtatcatatcatgctctggattcctaatgaaaaggagtttgcaaagatcacaggcctaactgctcttcctctctggccagcacttacccaaccaagccaccagcctcaacatcagggtggctccctaggataggaacccacagggaccctgtttgtagcaagatttgtgtttaaaacacgacagggtctttaccccttatctagcaagagtgagtaatctatttgggatatttaataaaaaccagacattacctcactggtgtcttatccaggactgctccagtcttcccattaatcccagtgatggggggtcttttgccatgttaagcaatatcaagacacccaaaaactctttgttctgggcaaagggagtcacagaacacacacccacacagacggacaggcagacggacaggcggacggacaggcagacaggcagagaatgagtatgtgtttgctttcttcattttaagaagaaaatgaggattaaaacctcagcccatcccccaagtcatcttgaatctaaccaactataatctggtttctttgctccctcttccctgggggacaagaagagcttcctgtgtgaactcccaccaaccccagggaggtgctggtatggttgctggggttaccagctacagacagactcctctagagtgatggccgttctccaatggaggtgtcagagagatggtgactggaacagtagtcacatgctctgtaagcagctgcctgggctacagaataaagtagggctcatgtctctcccagatatggaaaaggactgactgaatcctgaagaagggcctgctccctagacagtaatgagatcatacttgggccacctcatgccagaaggcatgatcatataatcaatcctaggccagacaataggacttttgtgttttcccatagaaaaactattaaaaacctcctcctgcccaatatctattaggtgacatgagaaaaattttcagttttgatcagaggcatcataatgtgacatccacagctggattaatgctttgagttacacttggcgtgggactttctttaaaacgagtcagcagaaatgcagaagggaaaaacaggtgagaggagtctgacgaaatcagaccaagggttaagtctaacagaaaatgttacttgaacatactgttctcgaagctgctttgtgactattgtgtgtggtgggccatcattatatacctgaagctggcctcacactcagcctcctgagggtgtgtaccatgacgggtatgtaccaggagcaggacatgtctggctacctcaacttttatggatgattaagcatacccataatttattttttcccattttcataattttctaaagcaatcagattaagggatgtagctcagtggtaaagcctttgcctaccatgttcaagactctgggccccaccctcagcaccccttccccccaatgaataaagactaagcagcaagcatagaaggcaaagcagagactgggaggaaaaatggaactcgatctgtttaagcctgggacctgactcctgctaggcaagagctctctctaccactgagctacaccgccacccggagaaatcggtgttgggaaaatcggtgaagggttcctatacattaatttttaaaaatcagttccatcattcaaagcagtaaagattaaaagaaaatagaagagcaacatgtgtgctgctcgtcaggaaagtttgagtgaggaagcaagacagccgggactcccaaaatttaggaccccccagaacgtgctgcattgtgagctggtgttttgacccctgtgccctacaatttggcaacttgtccagaagtagaatcacacttgggttctgtcttttggatagtgcccataatccccaaactggagacctctcgttccaatccagcctgggctacttagtgtgatcttgtctcaaaaataaattccggactggaagatggctcattaggtaagggcatctgccaccaagccctgtaacctgaggtaaatccccagggacccatgtagtggaaggagacaatcgacccacaagttttcccccctccacacgtgctttgtggcacacaccccacgtgtgcacatacatgcacatacatgcacatgagtactaaatgtcataaaaatcttagttaattgaattcctacagttcttccgattttaaatctcatttccctccatgacatcagaacaccttgacccaactatgacttcttgaaaaatgacccccaaaacatcccgtctagcctttctctcctcagcatcacttactaccatttcttctactgagtcaaatttgtcacctcagtcaatcacctgagccactgtggtctccaacagccccttctggtacacagaactcaacaacgtccattttagcagtcattggtccttttcatttcacctcttcccacggagttcaccccagacagagcttctgatgtatctttcaagattccaacatcctccgcccccgaaacgcctttatttttctcccaaaacactgctttacgccaattatttccaagctaaaaaacatcatgatggctctttgccagcatagaacagccccaaatccttaccagtttgtgtactcccgacaagatctcacgctgctgtccctccctgctctgtggccggctatccatgtcactaaagagccactcagggttttctgtcttccagcatttgttcaggcctgagatcttttatctgtccacccttctgagtgaggttcagggctacgcgcagaccacggctagaatcatttcataacccagcccggtgcagccttgggtgtttttattttgtaaaaaggggtctggaagtcacctcccttctgcttccccagatctctttccgttaataatgagctcagaggtacagtacgtgttagcatagatagcacctgagtttaatgcctgatgactagttgtcacctgctgtatacccccacggccctgcaatacctagcttgtttttggtttgttttggtttttggtttttttttctaacaaaatgataaattgtttggcagaaccaggaaacagaggcaaggaaaactgacatggtcaccctaaaatatgtcacacatatgcatgctagagccggctgtggtggtgtacactgcaatcccagcaccaaggaggcagaggcaggaggatcaggagtatgaggccagcctgagctacatagcaagactgtctcagaattctaaacaaaaaccaaaaagtcatactcatgcacactaaatccatccatctaacccctgctattcttcgtctttagcaacaatacaggaggcagggacatagaaaacttcgttgcaacatagagcaagaacctgattaacatgagattcttttaataataatatgttatcaattatattttgtatttattttttgaggtttttttgtttttgttattttttgagacagggtttctctacgtagttctggctgtcctggaactcagagatctgcctgctctgccacccgagtgctgggactaaaggtgtgcgccaccacctcctggctttgctatcaattgcaaagtgcacatcttagtatgtctgaaatcaggcttatcttgcagcaatagaatttgttctcttggtggtagggctccagttgtaactcagttggtagagtgctcgcctggcatgcgtggagccctggagttgctccccaaagcagtataaatgaggcatggtggcacacacctgaaatcccatcactcaggaggtggaggcagaccagtatctgttaggatcaggaagcagactcagtcagcagcagaagatctgggtctttcttggctgcacagtgagtttgaggcagcctgaggtaggtgtgtgtgtgtgtgtgtgtgtgtgtgtgtgtgtgtgtgtgtgtgtgtgtgtgatatgtctttctttccaccctcactttgtgtaaggccccagggcgtggacttcagctgcaggcacacaggtaaggcaagggttctcctactagacttcagtcctaccctttggtggtttcttgaatttactgaagttcatgctaggctccattgttgatttttttgccctcacactcttcccactgttctcaattctccggggattcgggcagtgtcgactcttcccttgtcttcactggtgaagccaggagccccgccttgggtcactgtctacctttgaatatgcctcccatacccattgtcccagtcacttggcagcagactccttgggtggtaacaatccgtgctcatgggagactctggaagcaatatggtgtgccatgaataattactgttctaattgtaaaggcgaggagctgggagtaacctgagagccggggcagagagaggtctggaaacacacatgtgcacagaaggatgggctttccgagggctttgttaggtggttttctgctcgtggtttttttttttttttcctgtagttgactgcttttgcagctgtaaatagagctattactaacttagtccctggatgcttgggcaggggcctggctacagagaacgttttccggctctggaagcagcagagggaattgtgggttccgtctaaagcctagccaaggagctgtgtgactcgggtgatgggggaggcggtggtgagagggaggggcgaatgtagacatgactgaggtcaagagtgccttgtgtggcagagcctttcctgggcgcccccaaaacactggcgtctgtttccttggcatgcctggatgaaggaggtcggggatcccagtcagaggagacagtatgctgctggagagacagccaagcttcctgtttgtctgtggtgtcccaatggaagcctggagtgcagtgctgtgttgctgtcgacttctctagccctgagccgcagcatcccctacagaaacctccttgtgggaggattaactggaaaggcagttgaggctgtgcactctcggatgctgttctttggccttccctccagtcactcttgagtgctttatctttgccagaaccacacagggaggaagctactgagacaaaggggggctgtgggagccaatttctatccctagcctgtggttgacccagcaagcaagtaaccttgatcgggcccttaagtccccactacactgacaatagtgggtcctaccttatgtcatagaattcctgtgaaaaattgttgctgataatttagagcactttgagatcttgccagagataaacaacaaacagcatgcctgcatctgggcccagagttacatggtgtccttgaaatctggctctctgccgacaggcgtcctctgtcctttgcttcgtgactaggtttagagcacgcttggggttggtgataaatatagctaccatccattccatgtttaggatgtgctgggcacagcagctcaatggtcatagcaacattgtgagatacagttgacaaaacaggtccaaagaggttaagtaactgccagggatgctctgttcatccactcttatccaggctgttgaattatgttaaacagccaggtgatttgtcaccagtgacactttctgtgtgctctgcactgggctgggtgggatgaggcacgggatggtataaacaggcagaagctcgaggcaaactaggtggcagcgtggaggcaccaagtggctttggggatctgaaggaaacttcatggagaaaatgaagcttgggcatgcttgggtttttgcctcttaaactgaacatgtagactctctggggcccttccatctagaaagatgctaattcacattggttgagggaaaaaggatgttcgggagggactataaaatctggaaccaactgcagacaccacctggtgcagggattcagggagctctgctcccaaagcccagtaagttctgcgctttaaaaaccctgcgtgttccctgaattgtggttgtagataaagttcatgtagaactgatatcagtatgccagacatgcccccgcaccccacagtgctgagggtggaacggacacggttgtcttgaatgtgctgagcaagccctttgtcagtgtgtctcaccctctgtgccaatgtcagtgtttcatagatgtcatttcacgtgggccaccacttagtcaccagaaggcgccctacaggcaatggaagtagtgtgcagcctcaagcaactcaagccaaacttcctgcatatccgtgtgaccctcatctttgcagaattggcgtttatcaagactgcactatatggacacttgggcttttctccccttttgggtgtataccttatcactgtaccagccagaatacaaatagcttcttaaaacctgatatacatacacatatgtatgtgcaatacatgttatatgtatatagattaaaaattatgtgcaaaaattagtggtgcacgcctttaatcccagcacttgggaggcagaggcaggcggatctctgagtttgaggtcagcctggtctacagagtgagtttcaggacagctagggctggatcaaccccccaccaccaccaccaaaagaaaaacccacatgcgtttgaatgtgtgtgtatgtccctgatacctgaggatgccagtagagggagtcagatcccctggaaatagaattgcagatggttgtgagccaccatatggatgccaggagctgagtctgggtctgcaaaaccagcaggtactcttagttaaggaaccatctctccagcctccttttatgtttttatttcttacattaatttagcatgtgcgcacacacatgcttacatatcacaaatgtgtagtccagaggacaactttcatgagttctctccttctagcacgctggtctcagggatggaactcaggcttggtgacaagcacctttgcctatactttgccacctcacaggtcccatacagctatcttaaatgtaaatacttaagtggtttatctttttatctgagtctacccatgctgaaagaaggtcaatgaatgtgtgttagcttcaaaaccgagaatggagtaaagaaaaaccctactggaaatgacagcaattattggtaatttgcaaccgattgcttagctgttaattgctactcgtcactcagtactttttgaaacatcagtaagttgtttgaaatgcagaatcgtgttaacggtgtgttggcattggtcagagctgaaactggagctagaggtagctggctttggagcacagtctctaaaatacatcttcctttaagaacttggctactcttacactgggttgcctggtgtgagccaggctgtcagaggccagatgtacagagaaggctctgataagggctggcactgcaatgctaactgaatgactgtgattcactgtccagggagcgaagagaagcctgtgattaaaaataaagcgagttgctgggtggtggtggccacgcctttaatcccagtactcaggaggcagaagcaggccagcctggtctacagagtgagttctaggacagccagagctacacagagaatccctgtcttgaaaaaactaaaataaaaataaagcagtatttctgatttggcaacaaaggttcaaatgcacctctccctgctcactgcctggcacccagggtggcataggacattctctgggaggcctgtgaacttcatgccttaatgctgcccatttgaaaaagtccctcctccacctgcctgtcccacctccccggcttcttgttttgtttggctttgctgtgtccagggtctcacatgacaacaaatgcttgcccactgagctacacctccagcccactcttccagaagtaaccaatgaggctttaaatgacagcccagagggggttccacagaatggagcaggatttgaccccttgttcagctagatgggagaagaacaggccccagcaggaatcctaatcaggcctaccgattctcagtgttcctagctctggcttagggaaattctgcctcctgagggacaaggttgaccggtgtttgtgtgtgtgtgtgtgtgtgtgtgtgtgtgtgtgtgtgtgtgtgtgtagtttttttcttcttggtggatggagctctaatgggattcttgcaggtgctgtttctggtgtcagagctacccagatctgtcctggagatacccagagactccagcttccctgcccttcacgggcaggtggcaggactggaatgtgagctgaggtggtccctgcagagtccttctgagtgtctattccccaaagccctctgggaggctccactttaggcagatatcagaaaaggttggaagaagcagggtggctcggtgtgctgtattgaaacctgatctgtggttgcttctctccaaactctaatgagctccacctgctctccagctgctctttaagggacacaatgaccctatgttgctgaagaggcctccttcctcttctgaggaagcactcagccttatgttttagtcagtaggagctcaacaagctcaacacacaccgacaatcggcacacccggataccaaaggggagctatattgggcagggcacgtatgcatagtagggcctccagggatttgttgtagcttgaaccttgcccacctaacaacaggctctctatggctcctcttatctcttgccctctccccccccccccccccccgtcacctggatgtcctcctgtctgaaggagtgggcacaaactgttccctagcctcaaagccccagggggaaggaagcagaagcagtcagtccaactggcaaggctcaagcaacagagtgaaggccggggcagctggctcactcctggtagccctcacttgccgtcagcatggtaggctttcccagctgagtgagcgcatttgagcatcctctcgcacactcaatggcctgaaacttgccactgtttctccagagtttcttttgtcctaacaaataaacagcctggcatgtgctgtggatttcctgtgtgcctgcactgtcaaggctcctgagccttcccaattttactgccacactgaggagggttatgtagcctaagattgcacagtggtatacagcagagctgaacgcctataggaggtgttgggggcctgtttaagatgactttatcttaactgtggttaaagcatttatgttagccagacatggtggctcatgcctttaatcctagcatttgggagcagaggcaggcagatctctgagttccaggccaggctggtctacagagcaagttctaggacagccaggactacacagagaaaccctgtctcaaaagagagaggaagcatttatgttttaccaaacttgggtcttgtgtagattcacctggtatagggaatagctagctacacctatggattgggtcaaaactagccttagccttttgtttgtttgtttttgtttttttggggggggggttcgagacagggtttccctgtggctttgaagcctgtcctggaactagctcctgtaggctaggctggtctcaaactcacagagatccacctgcctctgcctcccgagagctgggactaaaggcgtgcgccaccaccgcctggctttttaggtttttcaagatagagtttctctgtgtagccctggctgtcctggaacttgctctgtagtccaggctggcctcaaactcactgagatccacctgcctctgcctccagagtgctgggattaaagatgtatgccactaccacccagcagggcctattttacaagaatggtttcttataactctcaagggatatttttgcttatttgttaaaaaaaaaaaaagcaaagcagggattctgggaagatggtttagcaggtaaaatacttgttatgaagcatagggacctggatttggatccccagtacccacacattaaaagccgggcatggtagcacctacatctgcaatcccagcaccaggggaagcagggacaggtggatcccagccgtcctagcctaggttcagtgagagactctacctacctaaataaataaatagtggagaagtggatgagaaaaataaacagatatcaacctctggcctctactccactgcacaggcaagtacaactgaacacacacacacacacacacacacacacacacacacacacacaccagagaggaggggcatataaactaccaccactaccaacaacccaaaactcagcagcctcaggaacaggccactatcttcttatggtctccggtcggcttctgcacaaagaaaaccccactaagggatttgcaggtacagatcaggattaaaaagtatgcctaggaaggtgtgaggtcctgggttagatcaccaataccagaagcaaaatagaaaaaaaaaatgcaataaattgttttatgatggaagatggaggttgtttcttcttctccttcttcttcttcctcttcctcttcttcttcctcttcctcttctcctcctcttcctcctccttccgagacagggtctcaccacataattctgtacctggaactcattatggagaccaagctgggctcacagagatgcacctgcttctgcctccaggtgctgggattaagggtatatgccaccacacccatctatactagcagagagcttcagactattggctgtatcaccactagagtctgtgcaaacctctggctgattgcctggcaggccaggctgaaggctgtgtcatgactgtaatggttgtgtaacaggatgagaaattttggccttggaatagagggaaatgaaaggagggaatctgcccaaggctcccagagaccttggcagggaaccgaaggcttcttagaagggagatgcatcacaaaccacaggctgctttatcacctcggcagtaccaaatgtgtaaggcagtctgctgaggctgaaggaaacacctttgccctttcacactgggcatgtgacatgaccagggtggtggattccttgagaactggtccaggattcgtgtttttcttgtgtcatctcttcagtacttgctgaaatcaatctagtcatccccacaagcacccttgtatggcttccctgcttgacttatctgcctgctacgaaaaggccctgggcagaaacaagcatccgggaaggatgtcagaaaccataagatgagctggtccattgggtaagtgattgcttgagaagtcaaggatctgaagtggatctttcagaacccacattaaaaagcagggtgtggtggtctcctgtagaatcagggttgtggaggtagaggcaggtcaatccccagtctagtggaatacgcaagttccaggttcagaaaagaaccctcatctcaaaacggaaggtgcaggggctggagagatggctcagtggttatgggcatgtactgctcttgcaaaggacagtagtttggtcctagcaccgtgttaggtgcttcacaacttcctgtaactccaacttcaggggatctgatgcctccccttctgcatgtacccacataggcgcacacacacaccacacgcacacgcacacgcacacgcacacgcacacgcgcacacacacacacacacacaccacacacacacacaggggcttctcttcatcctccaacaatacagtctgaagccccagggagcaggcttgcaccagttggaggccccccgctgcctgggtccaccaggctctggcagcccccctcttctcacacctccagcattcaggcccttccttcctcctctaggaagcatcaggagggttaattatttctctgagctgactcagacagcattttgtctgccaaagaattctgttagctaagtgcaccacagatcagctcctctgtggttcccggtgagggaacgaacctcagcaagtcctgtcacggaggaggaggaacggagaaggaggctcacagcctgtggcttggggtggggtccagtgtggaccccccccccccccaaggactgggctggttgccaggaagatgttgagggagtcgttgctgaggagtgcctcccacggggtgtgtgagaagccggctcgggaacactctcaccaccaggctccctttcagccagtccctgtggggccagccctcctcgcctttcattttgttgattggagattgtcgccctgaatagagcttaatgtcctttggaaattatctgccccccctttcaaaaatgtctcctgttttctgcatttgctgtccattgtcactgtgttcctaactgctggaggggacaataggacatgagaggaaggaaagacacagatgctgctgctctgaggccaaccttgggaagagggagggaagcagtaagcaggagaggctctgggggcagcaggcccgggacgcagtcttctctgggctgagtgtggagtggggcaggataaagcctggagagtgggcagaaaaggagcgggtgggcggggccgcaagggagtgggcggggccgcaggggagagccaggctacaagcaggaaagctggggatggcaaagagaagctagctgctcagagggacaggaaagaccctgggcagacactcagagatgcagagcttgaccagggcgccattagctacaaccagtcttctaacccaggcgcctgaccctaagtaaggtgttatgcatagagaaagctcagtagtgcccttgctgccctccaccccaagctgacctgtgcagtgtatctgacctcctgctgctgggccaaaaagctttaccttcatattgaaagaagagcactttatctgcaaaaagacccaggtggggattggattttgcatactaattttactagcctggtagaccgcttacatagggcaattctcccccaatactccctagcccctcacaaacagcagagcacacaactttggcttgtcggtgcccacaaatactagaactactacacaggagaaggtattttatatattgcaatcacgggctgcttagtgatgagttctaagagaggcatccttaggtgatactgccatgcaaacacagagtgtgcccttacacaaactgaggtaatgacccaccagtagggcacagggtctgagggacactgcttgctgaccaaaatgttatgtcacacatgactgtatgccatttaattcctcattaaccctgttgaaaggaaaagtatcagcccaggacccccaagaccagcacaaaggagatttatttaccccagagggatagagggcagggagtgagcggcagacatgggagataaagaaggggcagagatatgctgtttttaataaaaaccctgcaacagttccccctttttgtctagataaaaaggaaaggtaaaggagcatctcctgactgttccctcaaattgggtggttgtccagtgggaaggggcagctacttgggcaagatggtggcatgggtgccagcactggtctggggttccaagccaggatttcaagtgggccagctggaggtaagcaatagaatttggcctttcctttttatttagacaaaagggggaaagattgcaggatatttgatcacactgcaaaccctgagattgtgtaatttactggaaaagcctgtttctagttgtagtgtggctcagccctagcacacacaactttttttttttggtttttcgagacagggtttctcggtgtagctttggagcctaacctggcaatcactctggagaccaggctggccttgaactcacagagatccgcctgcctctacctctgcctcccaagtgctgggattaaaggcatgtgccaccaaggcctggctgcacacacacctttaatccaagagctttctgcttgaatattgcaaacaggattaagtaaagtcaaccagaggtcaagaggcagatctagcaaccagttgaccagaagtgaacaagaaaaaaaacagagagtaaagagagtaaagggaagtcaggaggacagagagagacacacaaaggaagtagaggggagagacattcagtttgagcagtcttggtagagatggcaaagaaaaggtgcgaggtttctgggacattgggtgatgacaaaggactgcccctggatagagagggaacagatgtggcccataggaaaatggcagtttataaaggcacaaggagaaaccccgtgttagaatgaggtgtttacttttcattgggcatgttaattaaggtggccaaaaggggacttttgatttctggacttcaatactttgatagctggaggaggaagtggccaaataacggaaaagagagaccttggtggctttaggaatgtaatctaacagagaggatgggagagaaggcctaggcctgctgaacgttgctcaccatgcttgttcaccaagctggagctggccagaggcctttcacatgtgatttgtttaactgggaatgatgagagagtccaagacgcacagaactgatcacccccggccctggctgccatcatgacttggcagctatgtctcttctttggctgtggttttcatgtctttgtcacaagatctgaaattgagaccaagctcttccaaccaaacgagaaaacaaccatcaccaccccaaatacaaatgaacatatggcttttaaaatttgttgtaatttagccatgcctggtggtgtagacctgcctgtgattccaactacctgggaagctgaggccagaagattgtgagttcaagcccatgctgggggttcctggtttgtttttttctcagacataggtctttcttgccaatgtgtacaaaaagaaaacccttgccccttccctgaggtgccttggtgctgagctggctggagttgtttctgtcccttctaaccagtatcatctccaatacaaacaaaaacagagtattagaaagagcagaagtagcaggcctccagttgcctggatatgacccagtcgggggaggaacaaagtcagactggttccctagaggctggtcaccagggacgctcccctgcccagcactctctctgccaaggtcaaagcctaggaccacatatcgaatgtatgaatctacctgaatacaagcacagtgagaccctcccccattctgttctctgtacagaggcagacttcccagtccgatctgtctcttgctttagctgtgagcatggagcagagactgttggggaaaagcaaagaaggaaacggataaactgagggtattgattctagcagggtgactgcaagctcagcaggaaccggcagcaggatcacattctgtagaccatcttggtccactaaaagggatcgaatattagctacagaaaggtcctctggcttgcttggctgcagtctcagctgaccccagctcaccctccagacaaccatttcccaggggatcctcgtgccgagaggtcagctagggcccttcctcacattatgcatctcactaatggcttcgtaaaggctgtgcatccagcacccagcagcagctcggcacccactggttcagcacagtgaacccaagctttcattcagttctgtctgcaagtcttagccccgtctacaagtcttctgtcttaaacttctaaacttcccgtaactcgttcttcatcatgctacaaagcacttaggaatgtgtgttcaggagacaaacaagcagggctcaggtggccctgactaactagaaattccaggctcctctgttgaatagaacccatttaggattaagttaaactttatacaaggccgggcattgtggcacacacctttaattccaaattgggacgcagaggcagatggatccctgtgacttccaggccaaccaagaccagctacatagagagaccctgtctcaaatcataaaaaaattaaaataaaataaactttgtacaagaaaaatcaggattgtcctttcatgcataagaattccagggcaagaatgaagactaaatgaaactagcagggaagaagtcatttctttttttctttttctttttcttttttttctttttggtttttcgagacagggtttctctgtgtagctttggagcctatcctggcactggctctggagaccaggctggcctcaaactcacagagattctccatctctgcctcctgagtgctgggattaaaggcgtgcgccaccaatgcctggcgggaagtcatttcttcctccagcaccatccttagctctggcttccacccaccccggccccggcccctcacattacctcatgatccaagagggccaaggaacatcagtcatcgtatctgtgttccaagcagcaggatgagggagagggatatacagacaataaaatggtgatctacatatccgagtcagctctaagtaaacatcttgagaactccacatagtatagccctttttgtctcagcacccatgaaggcgtggaaatgaagtcttcagtgggcacaatactggagctttagcgttgaatggcagagcagaacggatgtcactcaggaacctgaaatctctgtcctagtccctaagctaaactgtcagaaagtatgccagtgcacacacacacacacacacacacacacacacacacacacacacacacacaagcacacatgcaccttttgtaagttaaccaacagatctgtgcaggcaactcctctttgctctgcatcttagatcccctggatgtgggttctagtgaccagagcattcttctccctggagagcgacaaggagttacaggaaggatcatctcccttcctcccttgctcatttgtgtttgccacaagacgggatcagatagcctagacaaactacagaagagtagcaagtggccatctgtcttgaggctgggtgattttcactggaatgggtgctgaccttcttgctgggtgtcctgtggtgccttaagggccatggcagcctgggcacagtgggattctgctcagtctctgtaggttagggattctctctagtgacctgcaggcttgtgcaccagtctctagagccaggtgagggaaatgagaccctgttccctctaccttagctcccaaaagactgatagccctcatagccacacccacagcatctttcctgtagtcgcagggacccccactgccttggattccatggctggtgccttctcacactgcaggttggttttctgttcagctggaggtctgtaaatgtaggccaactctgatacaatagggagtggtgggagagtggcatctgttacctcccagcgtgtctaactctgcaggtctgtttccttaggtaaaatagggatggtaatcacagctaccccccagagtgagtggctgtgagcagtacactagatactgtaggagacagcacttaccacggagcctgagcacaatgggtcctcactaaaagacagttaggtctacatctgagaaaacaaaatgaagatagatagcagagcccattgtgagccctggacccttaaacaaagcctcttctgacattagagaaatctgcaactctggcatcttggatggtatcccaggaagggttggtcactcactgccgagagccagccctaggcagagacagctggccccagaggacccaggccactccccatcggaaggctgtaggctcagctgagggagtgaattcacattttgtcctgggaacgctacacttggagaaacattattgattctgtggctccggcagcaaaggcagaagaaagactgaacttcattacctaaagcatttatgcttaccgtatgttctatttaaagaggcacttggcaatccttttcattagtatctcttctggaaacagttgcatccccattttgacaaaggcagaaatgagaagaaatagctggctgaagagcacatggccaaatagcagagttagagatcctggccctcgagtttcttgctaattgcttcactagtgcgccccaagtgcctgagggggtctcttgtgcttgtcctctctgctcagataagtcacgtgcaatcactagggaaatgcagaccgtcagtctgaggcttcaggacccctgatccctcccagcctaggacccgaggtagatggcatctctccaacccaatggcaagagattctgctgccagccagtcctccagcagggtgttagaagacttttccaggatctatgtcacaatacagagctctggacactggacttggggtgtgtggggaggcatagggaacactatccttgtgtatcctctgtgcccagcactttagtgtgaccccatagatttgagagggaggttgaggcataaactggaaactaagtcctgtctaggcaaattactcagtgtctcctggcattctctacctgtggtaaaactgctctggcacttgccacacagcagctcttagcaatgactcgaggaggtgtgggtctgaccactgttccatttccataggagctaggactcaggttcaagacagcccagatgcagagtcaacatagctcagaacatccactagtttctcttgtgcttcctcttgggacagtgtggaatgtgttgagtttttcaagatgatgctaggcccaggctcttcacggaggaggcctggccaacttccagatagttacagcgcagtgctggagtccaggtcatgctgctcctgacctgggaactaaggcctttgatcatagcagcatgacaacctgttcggctaccaagagaagcattcgggtcccgtgggcttccgaggatggattggtttgtagagaacagtgtgtttagtggccagttcttgcactgcacagagaacacggtgaacctggtagtcctgattgcagaggggaactaagaagtcaaggctgtgacacaaatacctgaaacagtcccatccctggggcctgacctcatcccttccttgccccaggaagaaactttatcagattcccaagagcactctttattatggcctccttcacgtcatgaggcaaggcctctcctctctccttttgagataagcccaaggagtcggttgtttggaataactcaactgacacagcaggaaccacccgtggggcctggctctgctgtggtgttcagaaaatgaagctgacctggagcctttcaggattgcagcaggcatctgttacatgttcttcagctgttgggcaaaagctttgtgtagacacaactgtctacatcagctttcaagacaggcctcagcaagcaagcgtttggtgggaggcacccttagtcagctcagaaagtaaagcctacaagccgcctgacctcagggctccatgtgtcatgctcgttctggtccgttttttggttggtccttcttaaggctcccccctccccgcccccacccccagcctgtcgtcgggagcgttctgtgacacagacagcacgttggatgagaggctaggagtcccttgagcagagcaggccggccgcttagacacactagtatcacacccaatggctcccaagcccaaacgttcagtgtctgcccctgctgttgggacgctgccagatcttttgtaacttttgaaaacagtcatcaaatcaccagatgacaaaatttccctcggagattgggaaattatgaaattatgattgggatgatggcatatttctggaagccggcatggctgtgcttcccggaggccaagagaaggaggccacattcacaaactcccatccagttctctcagagcagcgcacctcttccgtgttttccgcgctgaggtcaggtgtcgcgttcatttgaatgggggctccattgctaattatcttcccctctctccattagctgttctacagctttttaaaagaagaaacatccatcacctttaatcccagcactcaggagacagagatagatgaatctctgagttctcggctagcctggtctccaggctgggttccaggacagccagcgctacacagagacaccctgtcttgaaaaaccaaaaccaaacaacaacaataaaaatgacaaaagaagaaacccataaacagcagaggaagaagtagtgttttgttgttgtgttggttgattttggtcctggggatgggacccagggtcccagacatgctaggcaagtgctgcatcgctgagctaaaccctaggtctcagctgggcctctgcataagtctgcatcctagcagctctgtctgtctgactgaccctcaaagatgcttcatggcctcataatctcctccagctcttgtctttgtaacaaagggagattgcttatttatttatttatttatttatttattttgagacagggcttctcaatgtagccttggctgtcctggaacttgctctgtagaccaggctggcctcgaactcagagatcgaatgcctctgtctcccgagtgctgggattgaaggcgtgcacagctaccgcctgactcactactaaaatataaatccaaggtaataaccacatgcaggcatccagcatagttcagagtcaaaatcacatgaaattagggcatagattgccttccaaagtaagagtcatcttgtttcttccaacacatgctgcctggagttaagcccaggacgtagccagggttcatgaggccagtgtactcactctgcacacccatggacaagtgacctgtggctacagactgaccatctcaacctgtttagatggtggcctcttttaaagtgaaatgtgaggccagggctccaagccaccattgtccgcagcgttcccagggagccttttgtaccgtgccctggatgtccagcccaagggccctggctggtcccatccccggctctgcctcccgaagagtcctgttgcatcaaatgactgttaacatttcctttcacggcctttttaagctgctgggtgagagccaagcagcagcttcgcagggttcattcaccccggagctgggaacctttcagcactgtgggaaggctgcgtgtttgcaaatcagcatagtagggcagaacaatttggaagccatttctcggttcatcacactcctactcactgggaaactaaccctgggatgtgaagcctgtctggagttgtgacaccctaatgtcactcatttcatcttgtcaaacacccacccctcttaaaaatgccaccaggcatgtatttatgtttaagttaaaggtgaattagaattggaaaattactggagaattttctggcgctgcacagagagatttggaaaccggtactctacccagggaaggcattcgaccaaactgtgaagtaggaggagtctttgatgttcctccttggcctttgcattcacagactgcctcacaccttccctccgtggctgtcaccaaggactgaccctcaccctgcctacttcagcccttgctctggaccgaccttcctctcagctctcctgggaacactcaacctggtacagccctcctcccccaccccggggctcttggagacatttgtttgaaactgctgacaactaagttcccttctagcactgaattttggggcatgttcggggtgatgctaacatgctaatgctttgaagtcttaatccttcccaggggtatctgccagttcactggagatggatgacaccatcccccaaaccaacaatttctaatgaaatgtcaacagaccgaatggaggggagagggagggtagcctagtctgtatggtaatgtctgccgaaggtatgcaaatctttgcttgggataatgcaaaagacattggagaagggctctcttttcacttaatccattatttactgaacacctacttacgcatagctctaggagtccaaaggtgtcctgtgcttctcatcatagtaaatgtttcctgagcaacacaggcaaacgcttcaggaccacagataagagggtggctggttctgcaggagaaagcgacaggggatcaatattcacactctgctatttgcttacttgcgatggtctccctacgtagtccaagctgtcttcaatctcttgagcctcctgcttcagcttcccaaagtagctgggatcccaggcgagcaccaccaggcgttaggcttgcactgcctttaaggatgagcagttcaccagatggagagggaggaagcagagaaagtcactcaggccatttccggggaaggaaggaaggaaggaaggaaggaaggaaggaaggaaggaaggaaggaaggaaggaaggaaggccaagcagctgaagcctgagaaggaagggggcagggatggaaagtaacagcgaggctaaggctggactgtggaaagaacgtgccatagtctggattttggcagggaaatggtaaattttaaaggtgggacctggagggaggcctttaagtcactgggaagtggtgccttcgaaggaaactgggattctggccctttcttcctcctttctcactcttcctgccatgaggtaaacagttttgctccatcatacacattcagccatcaaaatctggcaccctacgagaggtgcgagaggcagagagtctgtccagccatggcctagagcctctgtaactacgttaaaccttctctgtttcttttcattttaaatattcatttattttgagaaaggatctctctgtgtagaccaggctagcctcaaactcatagagatctgcctgcctcagtagccttaaaagttttcttttttatgttggttatctcagctttctgtgtcgaagtgacagggctggctaatacaggtggcctacagaagtagctatggaactgcctgaaggtttttagacctctatttgggaggctactgctttctcccaggtaaaagacaaatgaagcttcatccagggccacagatggctagaagagagactaagaataaaatgggttcagatattagctgctttgatattagagctggaagcaaagaagtcggagtgacagttcatgctgtcatgtgatgtgttgatgacattagctgagcataggaattatgggagcaagggcataggaaatagtaataagcttaagttggggcctgttgcttagagaccaggctgtggaaggaaggggctgattctgatcctttgtccagtgtttctgtttctggtcttaagaggacaccaggtgcttgtctgtggcagctgatctccatctctgatctgattgctcctcctcgaccatcattctcccagcagataacagtgcagatgcagacagggtaaaccagagatctggggtgttccttccattaaccaaaaccactagataacagtgtagatgcagacaatgtaaaccagaaacctggcagggtgttcctgccactaaccaaaggcaagtagagtggaagcttccagaagctctgattggtcctcttcatttttctcagggttaaggggtggggtgtagctccacggtggcacacttggctgacttacataaagccctgggcccatccccggcactttgaaaataatgaaatcaatgttcagcccatttccactattactcaacatttcctctctcctctctctcctttgtagcccagctggcctgcaagtcaccattctcctgcctcaagccccttcctgagtgcttggataacaggcttcccagcacaccatgtagccttgctttgaagctaccttttcctttagggggactggggactttcccctcgttcatttcaggatgagcattgtcaagtggaaatcaggatcactggctaaatgcaaaccagcggctgaaactctgctgccgagatacagcatggcaagaattctttgtataatatttgcatcattatattcatgctctctccaatgtaactccacaattattatataactttgcatttcttattattataatgaaaaagtaagaaattaactaaagatgtccaagtaaaggactaactaaatgaatgtaaatgatccatagactaaaatttaattcaaatgatgtaagaggcttaggcaggcaggtgtctgtgagtatgaagctagcctggtctacacagtgaattctgggcaagccagatttacatagtaagaccctgtctttaaaaaattcaggaatagaaagaaaaccaacaaccgtgtaaatcaacattgactgaaagctacaaagacatccaatgttcattaactgaaaaaaatagattatgtaaatgtattatgggtaatcttgaaaagatctgaaaaccaggcaaagtgtgaatggctatctggggtgacagtgggagtctgaggtgcatgtcttccttttctacccctgttaggtcttcagcagccctgtataatgggcaggcagtgtaccagggccagccattctttcagctaaggctacactgtggagcaaggaagcccctccaacagtagctaggctggaaatgtggctcataaattatatttttcaaatatgcaagcaccctccagggattctttgaaatgggtaatcacattgggcgtctcatagcagcttctcttattatgccttcccagcttttcctacagccttcggtctgaaaatcttagatctttcccagtctttcagaaaaaaaaaaaaaaattgcctacggtctcatttcttaccctgaaattactgtgatttctggaattctaccttgctctgtgcagtttaccttccgacccagaagcggtgtggcaggagataagtaggcgttgggatgacaggaggtcatgtgagggccacgggctctgagagtgacgaagagcagcagaagacaaagaggttgctgggaaacggacgccagagcatggtcagatcaggttgctaactacatttgcagaataacattctgttctcacccgtgcagctgaggggcagcaggcaagaaagaaaggctcatccggctgagctgtgttcactcagctcttgctccagactcccccaccccgacccctggaacccacactgcagtatctgactggctacttgacatctttatttggaagtcttttttaaaagatctagtattacttaagtgtctgtatgtctctgtatgtgagtgccggtacccacagacaacagaggcagaggatgcccctggaactggcaggcagttgtgaccacctgatgggagtgctgggaactgaactcaggtcctaagtactgacagtgtgcgctctcaactgctgagccatctctccagctcatacttgaaggtctttgtagtcatctagaaataacacccgggagctagagatttagatagtggtcccgcacatggttacccgttcaagatcccggattccgtttacagcaaccaaaaaacctacagccaccccagtgaaatcaaagtcgtctccactgcccgcacttgtcctgcctttagcgttcccatctttgagaacaaaagccttatagtcaaaacaaaaactctcatcttcctgcatcccaacacactctacacttccatcagagaatctgctgacttgacctgtaagtatgtccagaatcagggtgcattttactgtctttgtcccatcaccctggtctgagccactatttcatgtcattctgactcctgacctcttaactggccatctttgtggccaccctggctcgactcacccccacttttgtttattttagtgttggttttcaagatggcagcaagagtaaatctttgtgtgatattcgtgtgtttgcgtgttgtgcgttgtgtgcatctgtgtagatgtgttcacgccacagtgcacatatggagatcagaactcaacctccgctgtcggggctccccttctcccgtgtttgagacgggctctcttgttctctgctgcatacatacaagcttctgggtgtcttcctggctctgcaatccatctcactgtaggagggctggggctacagacgcacactgtcatatcacgtttgcctggcaagtgctttgctggctgaaacatctccccagtctggttccgtggggttctcagttcagttgtcttttccaatctttgcccactcagagcaaaaagccacttccaacaatggccccccaatcatatctccatgatctgtcctctgtcatcaccctgatataatttcccagctctgccccattccctcccttctcttcatctctctgttttttcttgggcaggttgacatttctgccttggggcaaaggacagctgcccctgtcctggaatgcttttcctttttccttctttggggtctgggctaggacacccatgtgcaggtagagctcctagaggagatttcagacgcaggatgtttgcctgagattgtccccagggtgaagtctgtctgttcagggggagacaaagcaggactagcccctgaagccctctcagtgaagctgtcagccagtgagtgcggcgcgtataactgacgttggcagggacaacctgtgttaagtcgaggggggtctgactaccctgtctctcactgaaccagttgctggagctggggagccgagagcagccttcaaaagggacagtggcacggctctgctgtgtgctggctgactccccggcagctgcagatcccatgtgggtcaccacagggtctactggaccccaccccccacccctgctctgctgttatgcagctcagttagctcagggagcagctccttcagacttcacactggcttctttccctggagaaacatccatcaagaagtttaggggagggaactacagcccctgacgttgctcccccgcccccatgatggtaatggactaaaactctgaaactataagcgagccccaattaaatgctttctcttataataattgctatggtcagagtgtctcttcacaacaatagagcagtgactaagctacccagtgaccatagacctaaacatccaaaattgtgagccaaaataaaccttcgccgcattcacagtgagtcctaaggtatttgccatagtagcagagcatctgccatgcctgtcaaaacaccgcctctatgtgttctctgaccctgcttgataaaaataccttgacaaacccaagtagcacgcatacgtcattgccactgctcaatgagacatttcctgtgatttccggtggaagtacttctcctgttataaacgagacctttaatcctgcagagcccagagctgcaggcaggaaacacaagttcccccaatggggaggactgaaggtgatcctaagtaaagccacccttgtttctgcctctgggttgcaaggcctcctaggtgctgcctcatcaggccatctcctcattctcttctacagagcagtgtatgccatgatgtcatggccctgggcctacatttgtatcacctttgctctgttgtgggtgtgttaccgtgtggaggttgtggcagctgttactgcgcacaagataacacgaacatccagcctgcaaagatgatggagctagctctctttccagctgttcccttggagcagacagggcttttcctgtctccctcttctcttctgtcccctctctgtgtctcttcacctcttttctctttgctgctctctttgctttctaataaaacttctcacaaaaaagagatggtggcgcaagagtgagctaggccacctctgtcactggctgctccaccgctggctaacagagcacataagcagagtggctgacgggacgatgagagaaccttagctgagaaaatgcccccaatcagatggcctgtaggcaagtttgtgggtcattttctagattaatgatggatgtgggagggcccagcttactgtgtgcagtgcgtttcttgggcaggtggcctgggctgtattcagaacagcaatctgtgctagatgaggtggcacccctttaatctcagcacaggggagccagacatgagcggattctacgactgccaggccagtctggtctttctatacggtgaattccaggccagccagagctccatagtgagaccttgtcttaaaaaactaaaccaaacagaaaagagcaagctgagaaagccttgaagaacaagccagtaaaatagcattcctccatggttcctgcttgctggactgggattgggtgtatatgcattgaataaaccctttcctccctgggttgattttggtcagttgaaggctggtcatggtaggcttatgcctttaatcccagcagaggcaggaggatctctgtgagttctaggccagcctggtcttcatagagagttccaaaatagccaggaataaaaagtgatcctgtctaaaatatatatatatatatatatatatatatatatatatatatccaactagggcaacagtgttttgtgggatcctatgctgttgactagaacactctatcaacagatagttttgagacctatatggaataaaggcaaagtcacccccagaatgaccatctctttctgtgaaaattagtagggtggctggttggttttctcaaggcatggtgctaaaggcagcactcagtgtcgatctctgtggctggcatgtaggacctgtagctgcaatgacaaggtcggccttggtgagtgataacccacactgccagcccatggacagccgccatccttcctgtcacagtcagtggtggagaaccaatgacagaggtggtcaagctcactctagctgcatcgtctatgcagatcaacagctaccaggacctctgtactacatgcctgctctcacacatccatctaagaacctctaacatacactctgtcttgatctccaaaatctttccccttcaaggacacccacggatccagccattcagcactacaaaataagtccttatttgttttaagccaaagccaccttttctgcacacacagtttggatgacaggttctctctgcctgaaggtctgtctgcacatcaatgggatcatctttctatgttacccttgaatgacagtgtagtacagcaacaatcaatccattttcaattcgaactcacctattgagccatccatggaccaaactcaggttcatggcaaaacccaattatccagaagtttgcaaggagccatcaggtaagctaaggaagagacctggacagtgattgtggacgatgacacagtgggtcacacagatctgtgtccttcagcctggcctgtggttgatcctggacttgctgctgggctgtgtgacctcatcactccacagcccctgatagagccagctgatggtgtgcagttctgcctggtggagtttttgcctgatggtttcatgctccgtgtctaccatgccccaggagcatggcaagattttctaggaagttagtttcacaactgccagggccttgcttcagaatgctgagactctgcactgtgattctctctttggaaattgtcataaactctatgtgacaatttttctgaacactgatgtctcactaccgcacgtgcagaccaccaggtcaggtgcccgggcatcagaaactagagcctgcacgtgcggcaagattctttcactgtttctgatcctgtttaataccgaaggacttcagattaccttgtacaaagtggtaaccccaggtttggaatttgctgtctcttgaagtctaagggctcgactatgtgttgggcttccttcttaggaacagcaactgcaagaatcagtcatgtacccctacttcagagggatgtcaccaggcgctctagaccattggacccacaaaacagtgcagatgtggcagatctaggattccttttagagattcattttatttgatgtgcatggtattttgcctgtgtgtctgtgtgccgtgtgtactcagcacctgaggagccagaagaggggtcggagtcctaggaactggagttacagttggttgtgggccactatgtagttattgggagccaaacccagatcctctgctggagcagcaagtgctctagctacagagcagtctctaaccccaaagatttacttatttttaattacgtggggtgtacagagagttccggtaactgcagttgtcagtcactggacacgggtaccaggaactgaactcatgtcctccgtaagagcaatgtaagttcttaactgcagagccatccctccctccacccctaacctctaattcctcatggagatttttcttccattctctggaatgaatgagttccaaaagcctcaaaatcactagtctctccttgttcagatgatccagagagcatgatgtcatcagtatccagcctgtctaagtctcttggggctatattatgccaagagcaagagtagtaacataaccctaagccaagactgtaaatgtataatgctgtgttcccagtgaatcaactcttctgatggaagacgttggcccaggaggccacatgtctgaggatatctgtatttgctctagcaaagaccacaccaggcatggcagctattgtgggactacttcttgtttgactgtggggctctgtggccattctccaggtctgactttcacagggttcggatggatgattaaatggccatgtgatgagggtcaccagcctgcatcccttaggtctctctcagttactctcataattacatgttatgaatttctgtccttcccaggagtggatttcagctttcgatttgataccttggcacctgggggaaggagtaatgcagaactccagactctgccacttggcctctatatcatcaagctaagaaaacaaggcatacaattgtgtgtgtgtgtgtgtgtgtgtgtgtgtgtgtgtgtgtgtgtgtgtgttagtgtgtgtgctagtgtgtgtgagcgcatgcttacttgtgtgtgcgtgaactcctgcgcatgtatcttggggcgtgtgtggggttagaggctaacttatgggagttggttctctcctttcactttctaccacatgggtcctggaatggaaagaactcaggctgtccatcttggtagtaaatacctttacttatagagctatctcactgaccccacatccatttaaattatatatttaacactaggaaaatgatgatctgctgagtccagagacatagtgagtaactgtgggccagacctgggccaagctaagttactaactggcaccatgtgtatgcactttgaaagggtctcaggatgacattttagtcttggggtttcagcaaagacccccacatccaagagtcctgggaaaatattcttttgtatttatttttctaatgtcttattaccaaataaatggcagagttccctttagggaagactgaaaaactaacccgtgccatcaccatggtgtcactgggtgcttcctgatggggaccagatttctttattcataggctctggatctgaaactagtttatattaggaaaatgggcagagcttaactttggaagagagctgagtttttcattgggatgtctgtccttggcttcctggccatccattctggattttactttcttatgcccactgagcagaatgtcttcacccaatcattctgtctgtgttttgttaaccacatgctactctctgagggtcagggtcccctggctgacgctgcaaccttgcgctcattataattgcatccacctggcttctgagtcacatctgttccctatcgtttctgggtcccattactccattgttatctgtgaaccttgtgcagtggtggcatctccactctcagctctgcctgtagactatagccaatgtgggtacctcctccctcccgcccccatcagcgtctctcattgcctgggtgtcttctggatctgccatggaatagcatcgtccagcaggctttcctgctgcgtgtactgtgctgattctaacaacccgattctctgagccgtttggtttcttctttcgttgtctgccgtgggaactctgacatttctacctctgctgtggaccacaggtttcttcaggcttctaagaaccttcgtagaaagttctgctgcagtcctgagatgggtcccaaatggacaactcttccttccctttcccccttttcccctgggtcttgttcataccaggccttcagactattgtcccacaaatgatctcccaacagctactgatacaaagtggtaggctctgtggctcctcagtggaaaccctttccttccctgtcaggcccaggcttgcctctggttggggtatgctgttattttaccctggttattggtctcctagttaggaaggcaggtggggtcatattttgtaaaaatgcatgcggtcattcagcgggggttgaagtggtggggtggggaggtgctgcccttactagagagacgtagacgctcccacaggctcaaagtaatctaggaacacaggatctctgaatcaagccactgagacactcacatcccatgtatcggaggctgtgaggtccatgctcgctcagatgtcaggaaagggagaggatcatgggaggttgggaagttgaagagacggtgaggagctgcaagcagataacacgtatttatcctccaaatgaactgccaggcaggcaggcatgcgtaggcacctggcatatgctgacacaagcaggctgtacacaggcaggcacaggcacacacacacaggccagcccataggctacaaagatgcaggcacataggcctacagacaggctggcaacgataggggcagagggctccaggcctccaacctcaaggtcactcatagggaatcaagcggaagtgtcattctgcccaaaataataacatattacaccactgtttatttgggagttccccagacatccattgtcagccattttgtgcggagtcattgtccgctcccccatgtccagctcagctacattttagctgactcattccagacacccatatcgcaccattgtctaaacataaactgccccttgcagccttctgtgtccaacagaggcccattcttcctccatcaggtccttggccttggcatagatctgtctattttgtttagagtctgtaaattagaagataactgtatcatgttctgtggagttagccagtttctctcagaacttctgaaactgctttttggtatcagtggccttggtgacctcgagcacattgagggcactgtctttctctggggcttgcacttgcccacgtgatgaggctgctgacctgcacatccctgaaaaagggaacgggagcactgacatattcttgtggtacttctcaaagtgaccgtgcttatggatgcaccagaggcggtgcccatgcatgacaatggtcctctgtatctttatcttaaccctcagcaccagagcagggttctctcaagagccaaaatggtcttacagtcttcatctaaggcagtggttctcaatctgtgggtcaccacgcccttgggggttgaaccacccttcacagggtcacccaagatgattggaaaacatatttacattgcgattcataacagtagcaaaattaaagttgtgaagaagcaatgaaaataatttcattattgagggtcaccacaacatacgaaattatatgaattaaagggtcatacttatatttagcattattttccctgttaaaatgtaaaaccaagggttggagagatggtttagcagttaaaagcatttattgctcttgaagacaacccaagttcaattcccagcacctacagaatggctcacaaccttttgtaactccagtcccagggaatctgatgctcacttctggcctacatgaacaccacatgcgtgttgcgtgcgtgcatacatgtaaatactcataaatgtaaaggaaaaatacaaatctttaaaaatgtaaaatcaaaagagcaatctatttttttttctagtttgtttttttttttttttttttttcaagacagggtttctctgtgtagctttagagtcttccttggaacttgctctggagaccaggctggcttcgaactcacagagatctgcctgcctctacctcccgagtgctgagattaaaggcgtgtgccaccaaacatccggcaaatgttgtggtttttgtttagctttggctctattttttctaacgaatgcatcctaagtatccagaaaaggtcctggtacataacaggggctaaaaagaatcaatgatcaaatcaataaacaattaactctttagatgtctgtgaagagcaaactgctctgatgactgaagtattgaggtacaaaaccacagtatgtttactcctggtcctgtagacttactttcctaaaatatgacgctacagtcacaagccctctaggataggttcaggaagagcaaggaacagaaacaaactgctgtggagtacatagagaaatcagagtcttcatatattgttcctggactgtcttagttagggtttttattgctgtgaaggcaactgtgactgcagcaactcttataaaggaaaaaatttaattggcctggcttacagtttcagaggtttatttcgttatcatggagggacatggtggtgaacagacaggcatggtgcaggaacaggagctgagagacctacatcttaatccacagacaacaggaaatgaactgtcctccatcctggaggtagcttgagcataggagacctcaaagcccaccccacagtgacccacttcctccaacaaggccacacctactccaataaggccacacctcttaatagccactccctttgagggtcattttctttcaaaccacagcatggacagatggctaagatgttaaaagcactggctgctcttgcagaggaccggggttgcgttcccagcacctacagctcacaaacctccttaattccaggttcagggtccagtgccctcttttggctctgccagcataaggcacacccatggtacgtggacacacttgcacacagagcactcatacatataaaataaaaacaaattagttttaaaaaagaaaaatagtttggcaattctttagaaaattaaaccaggagttatcagacagcacagaatgaacaagctttaaaatatgcttagtgggatagtggtggcgcatgcctttaatcacagcactcaggaggcagaggcaggcaaatctctgaatttgaggccaggctggtctacagagcgagttccacaatagccaaggttacacagagaaacactgttttgtagaaccaaatgtgtgtgtgtgtgtgtgtgtgtgtgtgtgtgtgtgtgtgtgtgtgtgtggatgtgaaagtcacatatcgtatcattccatttccatgaaatatgccacacagattagcatatgaatataatatttaggtatgtggggggctagagtatatagttgagtggtggagtgcttgtgcctgaggccctgcatttggtcttcatctcccactgtccacacaccaaaaggaaaaacaaggagcaaatgatgagtggttgcagaatagggaagggaggtgactcctcatggccatggattccctttgtggtaatagaaatgctctaagatgttagaataattttaataaatcgtctgtgaatagactaaaagccacactgaactgttctctttaaaactgtaaggcctaccttctggtcaagcatgagggctgtagttcagattcccagcacctacataaaccttgggcaggagcagacctgtgatcccaggagttgaaagctatccctagagcaagccagcaaggtggacacagtagcacacgtctgtaaccccagcacttggaaggtggaagtaggagaatcaggagttcaaggtccatctcaactatatagcagttctaggccatcctaggttacacgagacccccatctcgcaaaaacaatcaccacaaccaagtgctgagcagaacaggcagacagactgcctcccgaggtctgcggtgctgtaactctgagtcagtagtaagtcaggtgggcctgggagtcttgggcttctcagctgattctgatgacgagccagatatgggaacctttgttccagttcagcctaccacccagggtcgttgcctctggcccaagaggttgactcagcctttccaagaagcattcccagactcacctcatacctcactgaggaaggtgctccacccaagtgccgctacttgttcatcctcacctcccctgccgaggctccagtcaggaattgtcatcccctgtttacacccctccccgttggcccagggctgagactgtcaggccctgtttatgcccctctccaccaacccgaggccgagaccttgaaagctctttgaagaagggagctgcattgtgtgagaaacgttttgcccacaatgtgcatttcatactgaggaccctgcatgtctaatgactgaataatgaagaccatcagaattaacagggtggcatgctattgcctatacagcatttggtacaaagcttttggcatagacagtatttatctggattttaatttaaaaattatgttgtgtggtttgggtgttttgccggcacttatgtctgtgtacctcatacgtgtctggtgtccaaggagcccagaaaagagtgtcaaatcctctggaactggacttatcaatagctgtgagccaccatgtggatgctgggaactgagcccaaatcctctagaagagcacccagtgctcttaactactgaaccatctctccagcaccttactttgattttaaatttgctattattattgtttattattatcatcattaccaacttttttcatgaattcttgaactcctgggatcacaatcctcctgcctgagtctcccaagcatctgggacttcaagtgcacccccacactgcacctggctcatccagctggtcttgaaaggaattacaatttgatagatgtatgagctctgacgataggcccaccctttggaaaggctggtccaagtgttctcacaaaagcatcttttaggaagatgcataatttcctggaacacttccatgtattctctggaatagaacacgctttgaagctctgttgtatgtaagcatgagaaaagggaagtacaggccaactgttcctaagtctgggttcatccaaatcaagttgagggcaagagactgagctcatcttaatcctacagtgcctgtgctctcgtttcatgctacccatgagtgcacagtgctagcagccttggacatgcccattggtgacactatctgaccccacacctttgttacttgcccattggtgacattgtgtctgacacccctcccccacctttattacttgcccagtgagtcttcatgtcaggaattcatgcatgacagaaatgtccctggaagccattcccatgctagtataaccaacaatagcttctctacatacttaggtgtccccataccacatgtatgtgtccctcacattgtgtaacctctctgggctggatccccaaagcccccaaggctgtttctgtatcacttggcattaagagaaagtgatgaatgggagattaggggtgaggaagaggtcttagctagtaaaactatattacttttacatttacaaaaatgctgcaactgtgaaagctcacaacgagctcctccatggagagggcccagcaagtcccttccacagtgactgcgcatctgcctccgacgcccgcttacggagcatccgttccatgctagaatcccgggataaggcacctagcgacacaaccaaagcccgtgatctcatgagagtcaatgctgcctttctcattgtggacagcaatgacgaggaatgggtgctaactgtgctgacttccagtggatagtcctgaaatgaataaacgaatgatagaacaaatgaaaaattccagaactgaaaactgttttcctgcagagactaggtgtgtcaaaaaagaaaatacaaattacaaaatcgctataaaagcctatgggaaaaacccgacaagagtggtcatctcatgggcatggcaccacacttaaccaggattcagtggggctgttgttttgatgaatgttaccattggcagggaacccgagatttcactcccttctggaactctctgagcaatggagcaatggaggaagaccttctcccatgcaggtcaagctgaggtgtgaaaggcaatcacagggagagactagtgagaaccggttccagccccacagggcctccagcttccctggccactccagctgctggaagcaccagatgcctggccctgtcattccgctcaccctggtgagaataacagctaagtcctccagctggcctctccactgtcacgctctctcctgcttcacacagacagaggcctcgggtcacactctgacaccaaacccgcagactcacctgtatcgctccccacctccattcactgcggaaccaaatctcagttctaatcccttgctgctcggagacccttcctttgacagctgtgctaactgaggagccatcagttaaaaactgtccccattggggctgggaagatggctcagatggcacagtcagtaaagagcatgctgaagaagacctgagttcattcagatcctcagcacccaggtaaaaagccaggcgcggcagcctaggatcccagcagtggggaggcagagaccggaggatcacgaggcttcctggccagccaggctagtctaactggcaagctccagggttaatgagagaccttgcttgcttgagtgagttctctagagtgtgtgtatgagagaagggagggagaggagcaggggaggagaaaaagggggaagagggagagagagagagagagagagagagagagagagagagagagagagagagagagagagagagagagagagagagatcaatccttagtttaaaatgtgcatatcaacagtacctactttgggtaggcctcaaatgagatggagtcaaaggcacacctctgtggtatgctcacttgcctagcacgcaccaggcatggaacagagttcctcccaataaggggtttagcacagtgcctggcacaagaaatgttttctactctctggtctactgttccttcctccccgctggactcactctgtctcctccctgagcccgtttctcaccttcattctacagctcctgccctaaccaggaactttcttttctttattttaaagaacaacacaattaaggacatttgtgtgtgtgtggtgtgtgtatgtgtgtgtgagtgtgtgtgtgtgagtgtgtgtgtgtgtgtgtgtgtgtgagtgtgtatgtgagtgcgtgtgtgtgtgtgtgtgtgtgtgtctgtgtatgtgagtgtgtgtgtgtatgtgagtgtgtgtgtgtatgtgtgtggtgtgtgtgtatgtctgtgtttgtgtggtgtgtgtatgtgtgtgtatgtgtatgtgtgtgtgtgtatgtgtgtgtgagtgtgtgtgtgtctctatgtgtgagtgtttgtatgtgtatgtgtgtgtggtgtgtgtgtgtctgtgtgtgtgtgtgtctgtgtgtgtgtgtgtgtgtgtgtgtgtgtgtgtgtgtgtgtgtgcccacccctcccccacacagttgtcactttcttcctgactctttttcaggaaggtctgtaactcactgtgtagtctaaagtggtttgagaaactcaaggcattcttccggccacagcctcttgggagcaaggatgacaggcacacttacttacttacttcttttgcgatagtgtcttgtagcccaggctggcctcagaccccttacgcagcagaagcggtttgtgtcttcctcctgcgctgggaggacaagtccatgccaccacccctgactctccattttgttttattttttttagacaagatcacaatatcccaggatggcttcaaactcatcgtcactgttattcttttgtttaaaaagaagaaaagagaaatattgagacagacatattgactataagtttataaggcccggtagaatggggagactaagaagaggaacagggtaatggctgaccgccatggccggtcgccatagagagacagagcggggaaacagagagaggggacagagagcaggaacaggggaagagagagagagagagagggcacagaccgagagtgtaaaggtgcaggggcctatcttttaaaggggtcctctgcacctgcgtgcagacttctttcccatggaaccttgggctgaccagggtattgcctgagtggattccaccaggtaacaggggcaggccagcataatgcctgaacctttcagtcaccgtagatgatcttgaatttctgatcttctgtttctgcctcccgagtgccggcgttatctggttgctggggtctgaacaggtcacacattctactagctgagctacatccccagcccctaggcatgctctcagtgtcctgttgtatgtgttctgtgtccccctccccaccgctctgcagctcgtcataccaaatgcgccctccacaggcttcatccgtggtgatctggatcccagcagtgatctggaccctttctcattggcctctccccaaggtcattgcttttctctcctcgagctcttttgtttttgcctcccaccttcccaccctcctagactgctgtgtgagttcctcctgaatcctcttcatttttggtctcctcctggtctagcctggtctagcttcggcctggttctccatgtctcactcttgcccttccacccactaccccgtctccattagctcccagggctgatcaggcccaaggcctctcgtccacaggctcaagaataagcatgtcatcttcctccagaaaccggttttccctctcctttgagtgactccctcatcctctcctcggttgcccaagaggaaactcccatccacacctcatctggcccccggcctgccctccagctggcagcttcccatctctaagcatctgctctttcaggcctcccggactctcctctccctcataggccttccagctgcccatcgccttccctccctgcaggccacacccgagcctgccagcagggcctagagggaagcctcagtccccaggtctccctttagcctcggcctttcctcacctacaccacctcccctcactgtggccaggctgcgcggctttctctgccccgggtgactttctggccttcaaccgtggtgctccactcatttcctgctgcagcacatcccataatcaccgcggtcctagtgtcgccggcctcctccagtctgcatgctcaggaggggtcccagactcttggtcaccactggagcctcaaggatcgtgctgggtatgtaagtgctggactgattctggcacactggcatctcctcagcatcttcctgtgtcatcccggcggcatcccctcagcatcttcctgtgtcatcccggcatcccctcagcatcttccccgaaagcttcttccgctgttaacaaaaccttgaccgtgaggggactgagggaagaggcgggagtttggagaagagcctgatattgcgtctacacgcttcctccccaactgctatctttgaatcactccttacccacatttcctccccttaagttcatgctttggacactggttaaagttttacagaaagaaaaacaaaacaaaacaaaacaacaacaacaaaacccagagcaatggcagggagagggaggggacttttttttttaattgttagattttttttttttaagattttgtttctttattattctgcttccatgtatatctgcacaccagaagagggcaccagatctcataacggatggttgtgagccaccatgtgggtgctgggaattgaactcaggacctcacccacatgccccaccaccgagacacatccccagccctcttctctctcaaactcatcttcacaccacctcttatttattcatttttattttatatgtatgaatgttttggctccgtgtatgcatgtcaccacatgtacctgatgccctcggggccagaagaggacgtcggctcccttatagctggagttacagatggttgtgaaccatcatgtggaggctgggaactgaacttgaatcctctggaagagcagtaaatgctcttaatcactgagccatttttccagcccttcccactccactctctatggcctcctgcacctgtccgtctttgactgacaaactcttaacacattctccaatatacttttgactccattgtttattgttttactcactccgtcttctctccttgcccctgttctagcccatgttactggaaatgctccctttaaggtcacaagtgacctagcccagttgtccatccaagcatggctcctcctacccctgaactcaactgatgatccagtcatcatcatccctgtccctgacagggtttattacagacctgacctgcgtgccaccctgtgctggagaatcggtcatcaagaatttgcgcagcaaggcagaggcatggctaaggtaaacatacaccaaataatgctgaacagtgaaggcaatatagaaatataggcgggacttcctatcagaaatcgggaggacagcaaggctgagcggtcagagaaatcttttattctcttcttgtttatcttatttttgcaatgctggagatcaagcccagggcatggtgaataccactgtgttccagtctcaaggaaatacttggatttaaggtattcctaagttaattgctctatgatgagcagggcttgcaggattagggatggagttaggcagcagttgttaggccagacctagaccaagaaaatgcttctaacctacagactgcctcctgatgctctcttcaattgtaatttaaacttgaatttacacaaaaggctttgattcatgggagaagcttaaacattttaccagagtcagaaaagaacatctttttaaaaaacaaaattaaaaaggttcatcccttcccctgtgattgtccaccttgcaagtttttcccatggaagaactgggcatgaacttaccagctctgttaagcaaatattttccttgctgagaggtcagagtcagacctcagtctgcctcaggcatacagccttctgtcctccaagggctgtgtgttctcagagcaggcttgatgtccatctctgttgtcttgttatccagggtgttcctgttatcacaccatctttatttttgtttttattattgattacgttagacgttggggattaaatgcagagaagcaggaactctgccactgaggtgcactgctggccccatttataaacattacactttatttccatcacctgcatctgtgtgggggatgggaacaccagtgtgccacagcgtgtctctggaggtcagaggacaacttgtaagagtcagttctctcctcctgccatgtgggtcctggggctataactcaggttatcaggcttggtggcaagccccttaacccagtaagccatctcacaggtcatctcttcctcctcctcccctcctcctcccctcctcctcttcctcctcctcttcctcctcctcctcctctttcctcttcccctcctcctccttctcatacattattttgtgtaaacttgttccacacagattgtgagtagcaacaatagcagatatttacctggtgtttactggagccagactgtgttgaacacggcagagagaaaggaggaggaccggaagtgtatattggtaccatgacggcttgtggtgtgtaccccacagcatgatggtttgcagtgtatgatccgcagcaacgtttcttgggctccatccgagattaactttattttcagcattaaagacttccaaatcgttgcatactaacactttagtgattgctataaaatttcccaatactctcaactcctgtcctcatcttgttgcagattaaaaatgaattgctgcagaccagcacagcttgaggactgtgttttgagaggtactaacacatatcagcaaaaaaccttcacgctggtaaattttcatttatttaataagtatgtgttaagtggttgctatatagcaggtgcccagcttggggccacagtttgggcagcaaacaagaacatttggatcatcacgaatattctagcaggtgaaacagcaatataatgctaagggaagggttaaaacatttagagtttaaactagttgggaaggtcagaaaaggctttaggaaagtttttatcttagggctgaagaatgaacagggagtacaggagccagaatagggaatgaggtttctaaggaaataagtcgtatgcaagggcccagaggcagaagaccgaagattcataagataaaaaggacactgcactgtggctaagggccatgccaaggactttgagtgctatagtttgaatgtcccttcccaaactcattaggaaatgtcattgccactgtaacagcattcaggagtagagccttggggctggagagactgctcggtggttaaggacacttgctgttcttgcagaggacctgggtttgcttcccagcacttgtgacacaccaccgcctataaaactcagttccgggggatctgatcccatctttttgcctcctagggcatcgtactcgtgcgtacatccccacatataggtgcactgtacacataacttttgaaaaagatacaggaccctcaattagtgattagtgggcaggggagaaggctcaaagggtgcttgcctccaagcctgaacctgagattggtctctgagactcacaagatggaagggcagaaatgcttctaaagttgtcctctaacaaccacaggcatgcgctagcatgtgtgcctccccagtataaagaaatgtttaaaagagagttctaaagaggtgattaatgtcattctctcagagtgagttcatttataacttcggttcagaccttttcttctctttctctttttctacttgcctcatacctgctcagctgccctcaccccttgttgagtcaatgtgaaggctctcactaaatgccagcaacttgttcttggacttcccagcctccagaactatgagtcagacaaacctgcgtaatttagcatgtgttcatctatggctgtctgttctgccatcagagagcagattaagatgaaagctatagaaatttcctgaagggtttgagcaaatgagtgagacagccatttccttgtactttccctttaatctaaacaagcaatttttataacaactttaatggagaattaacgattcattacaaaatgctcccagatgaacacaatggggaccattctcttgcagccaggcttgtgattctggtgcacgtagaaacgcaaccggggcaatgatcacttcccctaggaggtcagtatgctgctctgtctcttttccttgctcccaccgtcacctgtgtactagctaaggctcagctgccctggaagccactggcagaaccacttagttttgattggatcaagccagcaatattcccaactaaaactcactttttgtccgtgtcatgatcctgtttgttttagtggtgctggagatgaaacccaggactttgtggatgctgtgaggcattcctccactgagctcctagccctagaactgacttcttaagcctttgaaagtgaccaggtgacatagttctggccaatgagaaattagtaagaacctttggcggttttcatagagaccttttccttccctttcatctccccgccccctccatcacccttgtcatttttctgttgcattttccccagactagcacaagcccctaggtacccacctgtgaccttcctgcctgccttgcccactgcccagcttcagggaaaccatttgctgtccataggaaagaagaccatgtaacagagacaccacatccccctccatcctatactaagagtcatttgtaggtcccggaggtgcacagaaggcaacacacacaaggacaatacccacccggtaaaggtggtggacagcagaacccgagttctgaaggattgggattagaatgtccacttctgattttaatatgtgataatacgatgctgcaagtctgattgtctggattttcaacttgaaagtgatggagctgtccaattggaaaggcatggcccacaaaaccagctcaactgcacagcacagcatcctcccgctgcggctgttcctatccttgaacactgagctgtttcaaaggggaaaagggcttttctttgattctgacatcccttcgcccttctcacagacgctatgttgggatacgtaagctctgcctctgtcctttgtctcctagaagaggaagggcaagcagtgaggcttctggtggaaactgctgatacaccacaccgcagcagaatgtgctgttctcatttagtttctaatacaaacccatttttgcatgtgggcactggcaaagaattgacggttacgaaatattggacaacagtggttatataggagatgacacacagcaaaggaatcttgtcttcaaattacacagaatgcaaaacccactgtggttcatgatacagctcttacatttttccatacttaccctgtggggctccagtgagagggactatgctccctgtgggctaagtgagtgtgtaaaagtacctggcagagctgtggaaaatgtgtgtagatgccccctgggaaggtacttacagcaggctgtcgactgctgcctggtgtctgcctcagcatcggggagctatatcgagaaccaaaaagaacagccttcagggatagagttcaggagggagatgtcaaaaattatgtaagctgcagatcccatattcaacaacacaaacataaaggatgggttcaaaggtggtttcttctgaggccagtatcaccattgctgatgaatgctgtcaccaaggccacatggctacaaggcaaagggctttccaagattataagctgtcttgcaaacaaagagcctctactaaaaataatttcatttgttcagacaaaactgagagaatagccctgcatggtatttcagggacaggggatcaaaacaggataatctctcatacctacagaaaggtccctcaaaggactatgcaaggagacatgttttaaaggaatgtgtacactcttgggtaggcaaacaatggataacgaagccttcttggtttgtactgaggctgggacttcactgacagggaggctgagagctctggaagaagagaatgagaggaaatccccgtgaccttgagacagctgctgaagtttaatgtatgtacattttcagtcactaaatttttgtaacatctggagcgtgattaatacccaaagaggtttaagaatttctaatgacactaatagctattgggtgccactgaaaagtggccctgctgccaaaggaacaaatggccagccacttagaatctccatggggctggaatgagcttgaggccaaatttagtcccctcttggaaactgtggtcaacttgaactccaggagccaatacatatcttactggatgaaagagatttcttggtgtttcaagaaaatttgaacatctttggaaagtcttagaacgttttaaaatccaacttggataaaagaggaatagtataagtacatgcacagtaaaacctattagggaaaatgtttaaagttagcctcaattatatagatcggattaaaactactatgtccttattcatttcatactctctgaatttctgagtttgcagtgttgctgtatactagaaacttgataagaatcctgacatttgggtcagggaaatggctcagctgggaaaggctctgtggtcgctccaatgataaatgtccccatagtctcaggttttgaatacttagttcccagttggtggcagtgttagggtagacttaggaggtgtggccttgctgcaggaactatgttactaaggactggctctgaggtctcaaggtcttgcaacattcccagtttgctcactgctttctaaaacctgagccctcagtatcctgcttcaacctgctgattgctgtcagccactcttcgccaccataacacactcttacctgtctggaacccagaacccaaacaaacccttccttttttaagttgccttggtcataatgtttagggtttttgttggttttctttttctctctttcttttttttggggggtggggtgggggatgtttcaagacagggtttctctgtgtagctttagagtctgtcttggaactcagtctgtagaccaggctggccttgaactcacagagatccgcctgcctctgccttccgagtgctgggatcaaaggtgtgcgccatcacgcctggctagtcatgttttatcataccaataaaaaaggaaaccaagacaggtactggctgtgcaagcccgatgacctaagtttgagtcctagaacgcacataaaggtggaaggagagaaccaactccacaaaggtgtcctttgacctccataaaggtgctgtggcatgccttccccaacaaatcacacacacacacacacacacacacacacacacaccacacacacacacacacacacacacacacacacacacgcacacacacacacacacacacacacacacacgcatacacacacagatacacacaaacacacacatatacacacacactaataataaatcaaaaaccttcaagaataaataatactaataacactggctttctttcatggtgctggcattgaacactaaacctcattcatgtggtgcaatttctctaccactgagcagctgcacagtcttgagaatacttttaagagaggaaatatttcaagagactcatttaaaaaactaggtagccttctgcagaggaaaaggataaattggactctactttcctacgaactggcttggtgaccttggtatttggagctacgcttttctgaggttggctagcaatgtgtaaagccatgttacagtagtgttagtgctagctacagttgttgtcattattctagtttgtacagtgccccatggtcaaaacagtatccagagagcccaggtacaggagcccatcctgatgagagatttacttggtgtgtgtgtgtgtgtgtgtgtgtgtgtgtgtgtgtgtgtgtgtgtgtactttccagacagggtttctcagtgtagccctggctgtcctggaactcactttgtagaccaggctggcctccaactcacagagatctgcctgcctctgtttcctaagtgacgagattaaaggtgtgtgccaccattgcccagcatgatttacttgaattttaaaatgagaataaactatcctgaaaagagagtaacaacatagtaccctcacacttccaaagtgcaggaattctggctcccctcaaactctatgagttccatggtaaggcaaggggctacagaatgacaagctcacctgaattcactgagtatttgtgcttcagatcatttggctctccttcacctcgaattggcttccagacagataaagaatgtgcagctctcatgaccatttgtcagggattcccatgcctgaggtcggggcagtggcatgggtcacagcagctgccattaccacagctgctggctatgcgccctggcagggctatttcaggtctgctgagtgttccttgccttgcctgcaaagatgcaagaaacgctttgaactattcaaggacaaaaaggccttggttcctaagcatccagccttctgctagcttggccggggtaggcttgctcctggtggggaaggtttccggtatctgtaggctgtagttcttggcaaactgatgcataatcatcattccttcaagtccaaacccttttaaaagatgtctgcccttttctttttctggtaaccacagctaaatatctaatatgagcccctccccaagatggaagcagagagtatctcttttgtgtgttgaggaatggttatacaggtagagctgccctgatctgaaatacttggaactggaagtgtttgggttattttggtttgtttgtttagacatggttttgctatgtgactccttgtgtcctctaactgttggatcacttgggccttccaagttgagaccagccttggtagcataatgaaatcccatttaaaaataaaattaaaaagaaaaaagatgtggcaatccatgcctgtgatcctatcatggggaggtagaaaaaaaaaaaaaaaaaagacctttagttcaaggccagccttggctactttgagagttcagggctatctttggctacatgatacttcatttaaacaccaccaccaccaccaaagacagacaggtaatatggctcattaggtaaaggccccctgcccgggtctgatggctgaggttggatgtccaggacacatgataaagaaagcccattctgacaagttgccctttaatctccatacagatgctgcgatacacagggccacacccacacacaataaataaaatggtttttatttgtttgtttggtttttattttttgagacagggtttctctgtgcggtcctgctgtcttgaaactcactctgtagaccaggctagcctcaaacttagagatcctcctgcctctgcctcccaaatgctatgataaattgattttaaaggaaagaaagacaggaaggagggagagagagagagagagagagagagagagagagagagagagagagaagccaagtatagcggtcatcagcactagggaggcagaggcaggcagctctctgcgagtttaaagatagcctggtctacagagtgagttccaggacagccagagctacatagtgagaccttctcttgaaacaaaccaacaaatgaagaagaaggaaggtaggaaggaaagaaggaagggagagagggagggagggagggagggaggagggagggagggagggagggaagaaggaaggaggagaagagaaaaacaaaagaagagaaagaggtaagacttcattttgaagtattgggaatctcagattttccaggcaggtacgttagacagtgactgccacctggcctgggtctaaccttgtgctaacaacttctaagctcttctgtttctgttttacaacctcatgtgtagatagttgttattaccacaatgcagtgcactgtccccaaggaactgtgatctcatagctgccttggcatgcacatggccccagaagtaacctccttttccactgactgagtgaaacctcagtggctggcaggggaaaggcaggcctgtgggtctctccaaaccagacaaaggagcagctttactggcttctgttatattttcccaccctcccaacccactgaccctacgtgctggtgattcagagtccatgcttcaagtatgactttttaagacacgtccctatagactgagggcatagtggcctccatcctccccagaaagctgcaatcctcctcctcctcctcctcctcctcctcctcctcctcctcctccttttttcttttaatggcctagggaacaaaggtactttcagagtgacaaaaagataggatgggatagagaacaggctggaaccatatgcactgaattttttagtgtaacaagaagcctaggtggagcacattcgtcatttatcatgcaggcagccccaggcaacagctgacaagtgcaaaatgatgccctgcccgttggcagactgttgggacactctatgcagaccagagcagcagccctttcctctgtccccctccgccccacccccaaagcctgttttcagcaaacatatgggagccattctggggcttacttcttcccttccagtgtccaaggcacgttgacgacaggggatttacaacagcccaaaatgtagaattttgttttcttttggattattccaagttttggggcctgttaaaagttctgtaaccacataaatatttatctggaggttttggttactacataaacataacaaacatgacactgggccccagtactgtaagtcacataaatgtccttccaattcagaaaaggggaagccaatagaggcctttggaaccgaatatttttatcatgaaatatttttgtggctatttttatactaggcttttaaaataccaaaatatatttgtccttgactgtatatagctattcagccatcactttctgttcatctgccaacttgtttaagcatgtccctggattgcaaggctatgaagagaatgtggatggtgcaacacagggctgcacctttataaatacactcaggctaacagctggaggcccaggataaaactctgctactctggctttatcacctctgaaggcgtcagatattactttgtttccaaatgccaaagctttatatttgttaacacgttctagttgacatagatgctgggcattcaagagctgaaatgtttagtgtcccagatattattactaattattattattattagagacagttttcttgtagtccattctggtcttgaattcactatgtagccaagaatgaccttgaatttccggtctccacgaatctacttgtagagcaaaggttttcagcctgtgggttgtgactgctttgatgtcaaaccacaggggtcaccgaaaaccatcggaaaacacagatatttacattatgattctttctttctttctttctttctttctttctttctttctttctttcttttggtttttcgagacagggtttctctgtgtagctttggagcctatcctggcacttgctccatagaccaggctggcctcgaactctcagagatccacctgtctctgcctcccaagtgctgggattaaaggcgtgcgccaccaacacccagctacattgtgattcttaataataccaaaattacagttatggaggtagcaacaaaaataattttgtggtcgggggtcaccacagcatgaggaactgtgttcaagggtcgaagcttatggaaggctgagaaccactgctctagaggatttggatcgtagccgcgtctctaggcctagtttatgtggtgctggagagtgagttcagggcttcttgaatgctaggcagccaatgtacaattgaactacacccccaacccccatatattattaaagataaacactcaattactcagaatggagcacatgttaatgaaaaatgtggtggaaaataatactgtgtatgtttttttttcccccagtactggggatggaacctagggccttgtattagctaagtaagtgttctaccattgaactgtacttggccattcttttcttaacccctccgtttaacgcaaagtcatcctccccatctaaagggtgaagtctgggtgtgcacacatgattttgtgttctacatggctaccagagtcatcgtgttctacttacaaaggttatacacataacctagatgctgagagaacgtacctggcataatacttcacttggctattgatagatagtggttggtccaaaannnnnnnnnnnnnnnnnnnnnnnnnnnnnnnnnnnnnnnnnnnnnnnnnnnnnnnnnnnnnnnnnnnnnnnnnnnnnnnnnnnnnnnnnnnnnnnnnnnnnnnnnnnnnnnnnnnnnnnnnnnnnnnnnnnnnnnnnnnnnnnnnnnnnnnnnnnnnnnnnnnnnnnnnnnnnnnnnnnnnnnnnnnnnnnnnnnnnnnnnnnnnnnnnnnnnnnnnnnnnnnnnnnnnnnnnnnnnnnnnnnnnnnnnnnnnnnnnnnnnnnnnnnnnnnnnnnnnnnnnnnnnnnnnnnnnnnnnnnnnnnnnnnnnnnnnnnnnnnnnnnnnnnnnnnnnnnnnnnnnnnnnnnnnnnnnnnnnnnnnnnnnnnnnnnnnnnnnnnnnnnnnnnnnnnnnnnnnnnnnnnnnnnnnnnnnnnnnnnnnnnnnnnnnnnnnnnnnnnnnnnnnnnnnnnnnnnnnnnnnnnnnnnnnnnnnnnnnnnnnnnnnnnnnnnnnnnnnnnnnnnnnnnnnnnnnnnnnnnnnnnnnnnnnnnnnnnnnnnnnnnnnnnnnnnnnnnnnnnnnnnnnnnnnnnnnnnnnnnnnnnnnnnnnnnnnnnnnnnnnnnnnnnnnnnnnnnnnnnnnnnnnnnnnnnnnnnnnnnnnnnnnnnnnnnnnnnnnnnnnnnnnnnnnnnnnnnnnnnnnnnnnnnnnnnnnnnnnnnnnnnnnnnnnnnnnnnnnnnnnnnnnnnnnnnnnnnnnnnnnnnnnnnnnnnnnnnnnnnnnnnnnnnnnnnnnnnnnnnnnnnnnnnnnnnnnnnnnnnnnnnnnnnnnnnnnnnnnnnnnnnnnnnnnnnnnnnnnnnnnnnnnnnnnnnnnnnnnnnnnnnnnnnnnnnnnnnnnnnnnnnnnnnnnnnnnnnnnnnnnnnnnnnnnnnnnnnnnnnnnnnnnnnnnnnnnnnnnnnnnnnnnnnnnnnnnnnnnnnnnnnnnnnnnnnnnnnnnnnnnnnnnnnnnnnnnnnnnnnnnnnnnnnnnnnnnnnnnnnnnnnnnnnnnnnnnnnnnnnnnnnnnnnnnnnnnnnnnnnnnnnnnnnnnnnnnnnnnnnnnnnnnnnnnnnnnnnnnnnnnnnnnnnnnnnnnnnnnnnnnnnnnnnnnnnnnnnnnnnnnnnnnnnnnnnnnnnnnnnnnnnnnnnnnnnnnnnnnnnnnnnnnnnnnnnnnnnnnnnnnnnnnnnnnnnnnnnnnnnnnnnnnnnnnnnnnnnnnnnnnnnnnnnnnnnnnnnnnnnnnnnnnnnnnnnnnnnnnnnnnnnnnnnnnnnnnnnnnnnnnnnnnnnnnnnnnnnnnnnnnnnnnggggggggggataaagccctgtttttgtttttgtttttcacagcacaattttaatgtctaacttgactgcaaactcctctagttgctccctgtagttgctgcattttgttgggcctagatattctgttaaaaacagtgccactttggggctggggagacggctcatgtgttaggagcacttgttcttgcagaagacctggctttgactctcagcacccacaaggtgactgtaaccatctgtaactccagtcccaagggatccgatgtcttcttctaacctctgcagacacagacattcacatggtgcacataaaaacatgcaggcaaaacactcatgcatctagtataacaaaacacggctgctgtggttagtgcctctcccaaggcccctgtgtggagagttttgacaccttgtgctgctggaggaggaggagctgtgagaagtcagatcactgaaggtgtgtgtgtgtgtgtccttgaaggagatactgagtccctggtcccttcctctgtctccttagattcactaacaccaaaaactgaaagtttcctctgccatttggcctatcattgtgtgctgtcttgctacagggccaaaagcaatgagccaaggaactatggactgaatcatctaaaactgtgagcaaaactaggcctttcctctatttaaacagctttgtataaggtcagatggaatcctgaccaacacaattacgaaacaaaagaaaaacacattaaaggctgcaggtgtagctgactgatgttttcatagactgcctgggattcaacgcccgcatcccccccaccacccaaggcattactaattcctctttgttattagcatcaacccttgccttcaggaggaagacctctgattaaaagataacatgacttgggaggtagaggtaaatgaccatgagttcaaggccagcctgggcttcaaaataagatctgtctcaatttaaaaaaaaaaaaaaaagcaacagtaaacaaaaatagatggaagggaggctgggaatgcagcttagcctagcattcgtgaaaccctgatactgaatgaaccttgagcagtgaaggctggaggatcaaaaggtcaaggtcatcctcagctacatagcaagcttaaaggccagcctggtctataggagaccttgtctcaacaacaacaacaaaatctatggaggactgccagacggtggtggctcatacctttaatcccagcactccagaggcagaggcaggtgaatctctgtgagttcaagaccagcctggtctacaagagcagttccaggacagcctccaaagccacagagaaaccatgtctcgaaaaacaaaaacaaacaaacaaacaaacaaacaaacaaacaaaatctatggaggaatagcagcaatctaaatgcatttctctcagtaaagtctaggccctccagaagcttcttggaaaacaaagttttatttttcaagtgtgtgtctacatacccagagtgttgactctggcaatttaggaatatataagtggcatattaggaaactcaggaaaatgagaatctatttttagcactcttttttttcttttgtgtatgtgtgtaccatgtgcacctttagcactggtttttgtttaaattataaagaggacagaaagaaaagaggcatggttggcaatgaaggaatgttgagtctctgcttgatcataaaagcaccagaaagaaaacctacttgtttctcttgaaccagaatggcgttgacagaagacatacatgaacagcatagaacagccctcttaacagagctctgttccttcttgactatatgtttgaagagcatggctcccagggtctacagtggagggagtaagtcttttcagataccgagtgtgctggctagtcttgtgtcaacttgacaagctagagttatgaaaggagggaaactcaattaggagcatatctccataatatccaacttagctagtgatttacaggggagagcccagcccattgtggatgggaccacccttgagctagtggtcctgggttctataaaaagcagacagagcgtcgggcgttggaggcgcacgcctttaatcccagcactcgggaggcagaggcaggtggatctctgagttcgagaccagcctggtctccagagcaagtgccaggataggctccaaagctacacagagaaaccctgtttcgaaaaaccgaaaaaaaaaaaaaaaaaagccagacagagcaagctaggagaagcaagccagtaagcagctcccctccacggcctctgcatcagctcctgcctctaggtttcagccctggttgagttcctgtcctgacttccttcagtgatgaacaatggtgtggaagtgtgagccaaataaacatatccatactcaacttgctttttagtcatggtgctttgtcccagtaatagaaaccctgacttaggggctggagagatggctcagtggttaagagcactgcttgctcttctcaaggtcctgagttcaattcccagcaaccacatggtagctcacagccatctgttatgagatttggtgccaaacactgaacacataataaataaataaatcttaaaaaaaaaaaccttgactaagtcactgagccatgggcttgctggtcatgtgtctctggactttacaagatcataattctgggctgtctgtcctatatgtcttgccattgtatggactgacaccaaagggttcctgacagctgtttcgatgttacaccaaggaaaggcaaaaagaaaaaccacaggtggggatcacccagaaagctgtgtctgctacaagaggagagggagcttatagagagagctctcaatcaggaaggggaagctctgagaagaaaccaggagaggaaagcaggctatctggcttaagagtggatagggggctaaggtcaacagacagaaatacccatctctacttgctcactgttgacttacactatattgtcaagtgtgatcaaacatttcatcatggctcattggtaaagcttatatctcagagctccctgacttgagagcaataggaaatatctggggggaagggagaccaggacaattgcaaaaacagtgtagagtcacagggctcagagtaagctggagccctggattctaggcccagctttgctaccacattactctttaccttcaggagatcacataggctgtttcctttctgtaagctgaagactgattgtgaccttcactactttctttaaagaagaggttcgccaagcctgtcatgggcccttcctgctgtccttcttgcaccacacacagccagctgcaagtgtctccatggggaggagggcagacgacacctcttgcagccatcatcagtgtctcatttctgtggaaaatttgtccccagatcccactattcaaggctgtcagggccttccacatgcaagagtatcttctctgtcccaaatgaccacaaatctcagaaccagccacagtgagcctgagacttcacagttgtaaaattctttggatttgctgatattgttagtgtaggcagaggtttctatcctgcaagtctctcccaagtagccactcagaggcttaatattaattacagatgctcggccaatagctcaggcttgttactagctaactcttacgtttaaattaacccatatttcttatctatgctttgccacgtggccttttctcggtccggcatgtccatcttgcttctctctgcatctgctggagactcctgactccacccttcttcccagaattctcagtttggctcttccgcctaacctcattctgtggagctactggtcagtcagcttctttatcaaaaacaaatcacatcgacatatattcattcacacagtgtaaagaaatatcccacatgttagagtattgggttttgggccattgagatggcaactgactggagacccatataataatctggaagtcaaattggtcctactggagagacatctgtgcttcacacagccctgcacggacccaggccttttctggtggatttctccactatcctccagttatccttgtctgtatgaagaggcccagagtcaccgtgtaaattctcagcttataggcagatgagagaagacccctgcaagagcaatttctttttaaacaaatggtgtagagatggcacacttgtgctcacagtgcatggggacatgtggttatacagccaagggctggaaatgaaatctcttgctgggcagtgatattctggctaaagtccattcctatggaagaaccaggtgctgatctggggagacagcccccagtatgccaccctacggaactagaagactataccagcttgccagcgtcgggggatcatgagtccctgagcaggcatcaacaatgagaaaaggaaagggaggaaaagactaaaattgtcaggaacttatgtctatcagaagggaaattaaccatcagcaaacatcagcttgcctttcctccctagttacggcccggactattttaaggacctctgtcacacagtgagctatcccagcgatagtcacacttaggaggaaaaaaaaatgtacttacacgaatttttacatgggattctgtttaaaagaaaacaaaaggagtgctctggctgaggcagagagggcccagagccctggccacctactcatcctcccttctctcgttgccatggaatctcagaggctgacgggaagtgaaactcctctctttccccctcaaacaccagggctccaaggaacccactttgaaaacgactgatctacaggaagcagggcccctaagtggctatcaacaatgaacaccgccaccaaagcttaactggggcagcagtgaaccttgctccagtttgcacagccagtgcacagatccatgcttccaatgtgggtgggccgtaacctgattattacagaggctcgtaatttgttacgatctttgttgttctgacatcaaggtgtccgtatattatgacagatttatttaataacacaaccagccgagcatggcggcttactcctgttatcccagcactcaggaggcagaagaactacctctgtttgaggccagccaggagtacatagtgtgttctaggcaagcctgggctataggctgcctccaaaccacaactagcataaatctcaattgtatcatggttgatatggaaaaaaatgccatgtgctctaagtagtttcatagtttgtcatgaaaagacatgggaggacaaagctcctcctggcccagagatagctgtcggaccacactgcactgagctgggcaaaagacgtgtctcttggcactgttattattagtacccagtggtccctggtttttccttctcttggtgtaaaatatggaggaagaatgaggtgtgtgagaggactgcaaactgcagctcaggattgattatgggcagcatcaggtaaagcctctggaatgtgcagaactggggcccaggaggccagtgctagagggcggatgaacacggtgttcagtttgggttacagaaaaagaggtagggaatgaggaagtgagctcctaatttgctcctaacaaaggtaaaaagaaggcttacttagtaaaaccatacaagataggcaaaaactgaggccagagtttttctcctacacctttaagtccagaagaaggcttctgagtcctaacctattccccaaagaaataatcttcccattggatcatgggttaaatgtgatgttgattctttaacagatgccctgttccaacataaatgggcaaatgtatgaacacagtggcccatgatggtaatcccagaacttgggaggttaaggcaggaagaccaagaattcattcattcaaagaagaagacaaagaagaaaaactgggcaaggcggcaaataattgaaatgctacttgacccaattattcctttgagaacattcagatcaactatttccacacttaaaaaattaagagctctggcaatgccacacatgaatctaaaactctaggatttttttttttcatgttactaaggagagtgtaaactggtataaccgatttgttttgttgtaaaacagaagacttaggtatttcattccttgagatagtggataggtaaatatttcattatttattttgtgtgtgggcgtgtgcatgccgtggtgtgagtgtgagcagatcagaggacaacttgcagaagttggttctgtccttcaaccacgtaggttccaggggctgaactcagtgcattaggcttgtcatggagctttatcggagccatctcaatggctgtggatatagattttaaatgatctttttcaaacatgtctgttaagtggactgtgaaatcaatgactagcttttttttttctcttttgttttttttagacagagtttcttggtgtaacagctctggctgtcttgtaactcatttgtaaatcaggctggcctcaaactcatagagaactgccagcctctggagtgctgggattaaaggggtgtgccaccacagccctggccatctgttgtttttataaagcccccacacagtaaaatacaaacgcacacacacacctatctgagagcttggtaaaactttacttttaaagcccaaagtcacaaatttaggacagtgaaggggagggaaggtgcatgccaggtatgcttcttaaactgtagggaaggtatcacaggtgtttgactactgtagtttacaaggtatagatatggtccatatgtgaacatatatgaaatactttaatgtatataatatatagaactaaaatcaatatagctataaaattgcctgatctactagctcaaagttatgttgtagtgggcagtgcgacatgtctgtaatcccaacactttgacacaccggaacgaagactgagagctttatgattcccagggctacataacaagttcaaggccaaactaggatacaaattaatttaggtgtggtatcatacgcctttaattctagcacttgggatacagaggcacatggatctctgtgagttcaaggccagtctgacctatatagactgagacttcaaggccagcgaggcctacatagtgagattgtttgtaaaataaaattaaataaataaactaactaaagaatccaaatgtgatggtttatgcatgtaaacccagcactttggaggctgaggcaagaggattgttgtgagtttgaggtttgaggccagcctgagttgtatacaatgaatgaaagaaagaacgaaagaaaggaaggaaggaagaaagggagaaagaaaatagaccctcacatctgtttatagcgagcaaatatttctccactacaaaatagagatttatgtcaaaaccagcaacaacaacaaaaatacggagtgatgaggaagaaatagaatgagcccattaagttgtccccttgctgtaaagcagttacagtgaggaccagtagtcattttcatagtggggaagtgagtcagtcaagacccttgttgggagggcagaaagatttctcctgggaccagccttgactgctgcagcagaaaaaggcttccaaataaattcatttgggttaacaacagatcgtgtgcctgtgtgcctctgactaaaatccattgcccttttcaaactacattgttgcacaaacctatttttgccggtgggagagtaacaagctgctgacaaaccaagttctttagcagacacgattcatttactgctctcattctcgagattcagttgaaatggatgtcttctttaagcttaacacaagcaatggcttttaggcatatacttgccgccataaattacaaagtaggagctggagagatgcctcagtgattaagagcacacactgctcttgaagaggacttgagtgtggttccgaacacccacaactgaggaggctaacaactgcctgtgcatctagctccaggggctctaatgcctctggcatccacaagcacctggacggatgtgtcatacttgtacacacgtgcatgcgctcacacacacacacacatatgctctaagataataaatcttaacaataatagtccatgaagtctttcatgattgcttactactgagagtaaagtgaaactggtccagtggtttaggggctgctcaatatctgctcaagatactgagtatgactacgctaaggcgagctttgctgtcgtaaaaccctccctggtcccaagggcacagtggaatacaaatatcaattttgaatccttggttcacatgagtggagccgattttcatatctttgaattataggtggtatattttgccaccagatttacacctgaagtcctaaccacagtgtctcagaattcctttttttgaaacagggtgatagaaagcatgttctttaagatgatactggagtcgtgtgaacccctaatccagcagagccactgtcctcatatgaggggaggttcagatagggacacagatatgcacaccgacagacaaatgccatgtgtagaggaagacagacaccaggttgcagaagccagggaagcccataccagaacacaccctcccccgaaaaaaataaaaaacaaaacaaaacaaaaaacaccaacaacaaaactaggagacatgccttgctaggaatcctggacttgtagcctctggattgtaagataaagggtctcccttgttctaagtcctcagtttgtggtgctcttcttaatagtcctcacaaattcatgccttcttgttctttaaggcttagaaaaatacttcatctttcatttagctattataattatgatctctgaggttttttttttttgtcaacatttgaaatatagtacctggaataagcatccagttgtgttcgacctgtggcttgtgggccacatgtatctcaagatacttttgaacatggcccaacacaaaaacagtaaacttacttaaaacattatgaggtgtgtgtgtgtgtgtgtgtgtgtgtgtgaatcaattgtagctctggctgtcctagaattcactctgtagaccaggctggcctccaacttggagatctacctgcctctgcctcccaagtgctagaattaaaggtgtgccatcatgcctagcaattcttaaatgtaaagtttagaaatgacaatatcaatcgccaaatcaaaaggttgggcctattagatgcttttatttttacttggtttttaagagatactgttttcctatgttgcacaggcttttatttatttatttttggtttttcgagacagggtttctctgtgtagcattggagcctattctagcactcattctggagaccaggctggcctcgaactcactgagatccacctgcctctgcttcccgagtgctgggattaaaggtgtgggccagcaacgcctggcttgcacaggctatcttaaaattcctgtggctcaagtgattgtcctgcctcagccccacaaggaactggtaataggggatatattgttatggtaggctcaaaagtgaattgtttggtttaaagtagctgcctaccctcttagataaactattgttatataatccaacctggcctcaaactcactatccttagcctagagcaggtgccaccatgcctggctttgtttttgttctgcatttgcttttggggtttggtggtagggactgagcacacggcctcatgtgccaagcacatactgtacctgtgagtatgtatctatctctatccagacaagcacatactgtgtctctgagattgtatctatctctatccagctctctgatccctttttggttgaccgttgggactaaatgaatcacttcccgaatctaatctatgctgtcatgtgtaatactcatgatgctaacatttgccccacttacttctcacagtggcaaaggagcccagtgaaatggcacatgacaaagtgtttacaattgtcaattactacaactgctaaaagtatttgttacattttctcaataactccagctccagagggatctgatgccctcttcctggcctccactggcacctgcattcacctggcagacacacagacacagacacagacacagacacagacacagacacacacacacacacacacacacacacacacacacacacacacacacacacaccaataaaaggttttaaaatagttaaaaactagaatgttgaaagttgggtccccgaatattgcctgcatggcatgtcttcctgtaaacaaagctgagcttattggccacggtagtcattgctggttactgtagtaacagagaccacacaacagcagacaatactggggtcttagaggagagggcaacaggaagagtcagaatttatagagactgtgaagcctgagctgaggcggttctacatggagctttcggaggactgagtaaggattgtagtatgatgtttggtctgagtggatacagcaagatgaggattttgagtttcagagtccgagggcataaaatgctatcactttctgtggaaagacatggaagttccttcaatgagtaataaagtttcctgccttgcaaagagtctcctggcatggataagctattctgatagacagaatacagtaataaggtcaggttcatgtagacagtatgtgattttgatccttgtgaccaaacactgtgagaccaaagacagatgatttctgttctcaagttcagaatgagggtaaagcctgcctgttatagtttggatctagagtgttccccaaaagccatggagtcacttgcttactcagcttttgtcccttctgtggagctgactgagtgacatccctgcaagtatcaactaaaagaaggatttctttacgttaaagatgtgaggggggggcgggtaaggagggggtcctggagagatagctcagtggttaagaacacttgttgctctcacagaggacctgagttcaattcccagcacccatatggtggctcacaaccatttgtacctccagttcctggggatccaatgccctcttctgacctctgtgggcaccatgcaccacatgaaaggcatataagctggaaggagacaagagagagaggcaatccaagggagtctgaggtttgttggagacggatgcagttgtatttaatcaggatttatggagacaggatcaccctttcagtctgaggcagaggtaagagctagtggctggctgctttgcttttctggtcttcagcttcaacccaaatatctgtctctgggtttttattattcctgccatagcatcacatttaatctaattttcaaaaaaaaaaatctgtcagtggatactttggtcatcactcttcaaatcttttccttttctgatgtctcgaatctctggatcactagagaaaatgagacatagttgaggtgtggtagaggctggagatgagagaagcagtcaggcaggtgggtgggaggggcctctcctgagtgaggcgaatggggcctgctgtagtcctactctgctgaaaggccaggggaatagtaaggtatttaaggaggtcctatcggcagccattcattagtgctgtcagtgtcacttgacactcagttttagaactcttggtttaaagagattctgctacagtgtcctgtgggagactccagaatgacaccaaaatttccacacaaattgtcactgacccctacgaagccagtgtgagcatttctttcttttcctaccttccttccttccttccttccctccttccttccttccttttttttttctcttgtagccttggttgtcctggaactcacagtgtagaccaggctggccttgaactcacagaaatccacctgcttctacctcctgagttcttggattaaaggcgtgccaactaccaccacctggccagtgtgaggattttgatctgccctgctgacctggttatggtgtgagttccagcctcacttcctccgaatggcaatgttcgaagcctgacctttcaatttaactgaaatgagtttttgttacatgttctttgtgcatttaaaaatcaaaacattcttcccctagacaaatttggcattaaatattccaggagtaaaagtactgatcatctcaatgtgctaaccaacccaacataaacatctttacctgaatttagttcaagtatcaaagctgtattactttgttggattttcatcttaacctatggggaggttagcacaggcagacattacacatgtgcagatgtgacagttcagaagccctgtgtgacacatctgaggctacatatctaagaagtggaagcaatggaatcaaaagccaggtctttggaatttaatgcttatgctttaaaaaaaaaataatggtttttgggttgttttgttttgttttgtttttttgtggggggagagcacatatttggaggtcagaggacaacttgaaggagctggtttttctatgatacgggtccttggaatcaaactcagattatcaggctgggtggcagttgcctttactggctgagccagctcaccagccctagggttgttctttaggtcaagtgtttttattcatgaaaacaggcagagccaggcttcattgcactgtggattgtgtgtgacattagtaacttgaaagctttgacaatcggctttgctagcagactgtctcgtgtgagataaataatattatcttactttccaatcctgcagtgtgacttaagcagtgacttgtcctggcctgagatactagaatttaagctagactgtaccccagggagggtctaccaccctgagctccattctttaaatagagacatgctttcatttggttgtttatgggttcccggagagaagtgtatttagaattggaaactgatgaaggcaaaggtgatcagggtcccacaaggtccccttgggaggaagctgggcatcggctgccctgagagagctactgctttcagtctgacatacccgaagcctgctgtagctaagctggtcacccagtcaccctccacacctccacccagccgcagccgccattcgaatgtgtgtgttctccatttgtttctcttttttctcgtttcctccctctctccctccctccctccctccctctctccctccctcccctctctgttctcttctctcccattcccacctctgcctctgtctccactccctcctgtatgcaacctgttgaatactagagacttgttcagataacaccaagttctccctccaagtgctagagtccaagaactcaagctctcaatggtatgtgtttgccatttatgctcctttccaaatgtattcctttgtcttggcaggctcttggggtcctgtgatggagctcccttgctgttctagctggggatccctatggggctcctctgctgtttcatcgcccctgacacccttatccctgtttcctggcaaggctggtgcacccacagctgtccctggctcattctccttcccttgtgctggtttcagtttgtgaagggttggaaacaagaatggcaaccttcccagaataagactacaaataagacttctcatcaacaagactaacaaatagcctggggaggcctcatgtgaattaagtgcccgagtttttataaacttattatcattatcattatcatcatcattatgattaatgtatttatttggctttttttttgtgacagggtttctctatgtagcagccctggctgtcctggaactcagtttgtagaccaggctggcctcaaactcacagagatcctcctgcctctgctccccagtgctggaattaaaggcatgtgccaccactgcctgtcatgaataagttttaagagtacaattcagcggcactggtttcgatcacgtggccatgcaattgccacttccatccacctgaaaacctttccatcttgtagaacagacactctgcacaccctaacgagctcacgtccaaccgtttccctctagcttcctgctgtttctctgagtggcttcaagtatttcacagaagcagaatcgtacagtgtttcatataacactattctcaagatccacaatcgtaccacgcttcagaatttccttcttttaaggctgacggctatccgggtgtatgatcatagcatactttcttcatccattccctcatcaggggacatgtgtcacttccccgttttgctgtgaacatggacatgcaaatgattccttcagtccttgctttcagttccttggaggatgtacccatacctggagctgctgggtcatacggtaattctaatttccgtgggagctacgctgatttattttgcacaaggctctgagtattccataagctcatcacttgtcatttcctgtcaaatgcctgtctgctaacttactggttctttgttgtcttttagacaataaaaatagcagctgtcacattgttggttggtgaaggtgtttccaatatgaagcagtaagttagattatgtgtcgcttatgtagcaatgattataaaagtcctatttttattcatgtatgcatgtgtgtgtgtgtgtgtgcgcagtgacagtgactcgcacctttaatcccacgacttgggaggcagaggcaggcagatctctggcagtccaaagccagattgacctgcatagtgagttccaggatggccagagcttcatagtgagaacttgtctcaaaaaacagacaaacaaacaagaacttcttgaggacatcacttaagttttgttttgtaatatttaatctattcagttctggggatcaaactcaaggcaccaggcttggcagcaagtcccttgacctgctgagctgttttaccagcttaatcccaagttttcaaaaaacaaaaacaaaacgaaatggaaaagccaagaaaacatttttataggaaatgtactgagtagactctttctcagcatcattttctcaatttgatggggaaagatccagagaggcctccagactcctggagaagtgattcttttttctttaaatatcaggagtatttggcaatattcatacatgaaagtgacacacagaatgaaaaaattagtccattgtccactcagaatgtaagaagaaaaactcattatttggacaaaaaaaatagaacaagagtcctggaaggctgttgttatttaattccataagcagccattgcttcagaattaattgacaggtaacagtaactgccactgttttggcattgccagacctttgggggatcgtgccttcatgtctgatttttgtagaatctttattgattcttgctagtatgcttgtggtgcttctgaaatgctcaaggaagatattgtcactgctgtagttttatgtatttggggtcttacaaatgattattaaacttgaaatccaagtcatggtttggctctggttgttgccagctaaaaaatgttataaccctgtaaaaaagttaagaagcaaccaatcatagactgctttgatttctaagttcatatgggataatcatgcagaagagaaatcctcagatttatagattaaaaagcacaataaatcatttataccattgaaaatatttgccctattccatatggaaaaagtctttctactatattttaacttgatatgtttgagtaagagaaaagaggtaatcaataaaagttacaactcaagtaatactaggttgtttcaagtgtgactatactactaaattatatgttagttttcttcctttttgttttgagtcaaatcataaaagaaaaagcatggcatagagcagtacacagccaggatgaacaggaatttgtgaggatgccatgttactgatgccttgcagattagactcaagtggtgtaattcttcattatgacctctactagcaaagttagtggagaattgcccggctttgatcctggcgctttgccgtctgcagggtgctgccctctagaagtgtcagccctgagccagcacaatctaattagtatcattggatccattactcagtttgaaatctgttcacgtatactactttactggctttctcaatgtagaattttaagaacattagaactggagggatgttataaatcagctacatgcacctctcgacttacagatatagaagtagagctctggcaagggtaagcaacttgctcatgccagattattgtttatttatttaaccgttggcccacacactccatcaaccaaagccatcaagcaggagttaatgtgagtaagagaggcatcaccactgttcttaggtgcagttcacccaggagaaatggtaaaatcacagccaaactgctactgtggaccgtggtgaggaccccactagcattgtggactggaccatggtattggagagagacagcagccatcagctctacccagggaggctgtcaaggcttcacaggtgtttttgagtggggcattaaagaatgtgaattttgtcatgcagagaagagcaaaaagcaacacagatagaacagacattacaggcaaagccacaaacccatgagcatatatgatgggactggggaacacatgtgacagtcttacatacaagtgtgtaggaggcaggagtcaagcgggaaagactcggtagaaaatggtcctagaaatcttgcgtggaggaggggtgatagaaagatggctcagcggttaagagcactggctgttcttccaaaggactgggtttcaacaagggatctgattcccccggacatacttgcaggcaaaacaccaatgtgtataaaataaaaatattaaaaaaaaaagttttgcatggagctgggtagaggtggcacaggcctttaatctcagtactcaggaggcaagcagatctctgagtctctgagttcaaggccagcctggtctacagaacaagttccaggacaacaaaggatgcatagagaaaccctgctgaaaaacaaaacaaaacaaaacaaaaaaatcttgcatggttaaattggtagaattatttaattgtcatactaattgtgattgtaccccccccacccccgagaaaacagggctctatggaaggcttatggagcagggctggcgtaaaccgtggtttgtgacgggagatgaaaatttacattctaggctgggcataatcccagcacttggaaggcagaggcaggctgatctctgtgagttcaagaccagcctggtctacagagcgagttccaggataggctccaaagctacacagagaaactctgtcttgaaaaaccaaaaaaaaaaaaaaaaaaagaaaaaaaaaaaagaaaattgacattctagacaggggatgataagaagaacctgggagtggaagaaagacagcggcagtgggagaagcgttcgtcaaagtagtagaaactaaaatcacaagagaaccccgttacatatccactgttgtgtgcaaattaaaaaaaactaaccatcccaagtgttggtgaggatgtggagaacgtaaaacagaacaattttattaaatagttcaacagtttttaaagccaaatatacacttactgtgcgatgcagccattctagttctatttaccccagaaaaagaaacaaacatgaatccttcctttcgtttgttattacttgttccctctgaaacttgagttgaaatagaatcctcacagtgagatattaaaggagtaagaaagtcaatctggttgtagtattcagagtgggccttgggagtacttgtactggctgctcctgcagagggtccaaggttccagcaccacaaggggcctcacaacagctcataactccagttccagggaatccaacgccctcttccggcctctgagaggctctgtgtgcatttggtgtgagtatattcaggcacatgcacatacacactaaataaaaattaattttcttttaaatatcatgacattacctggagctcatttttgtgtcattatttaaacttttctctgttatttcccttaagagtgatacatgggaagcagcagaacttggtaagaaaaacacaattagaactgttctattttttcttccagaaatgatcccgccttttaaatttttcatttatttttaagacaggctcctaccgtgtacctctggctggcctagaactccctatgtagatgaggctgtcttcaaactcagctgtccattcctgccttctgagtgttaccccccaaccactctcacacgaggttctttgttccctccatgaacacgattctaaaagggttctcaagccgagtacaccatccaagatgggtgaggtaaaagtactttatcccactggccggcgttaagaccagccatggctatgacccaggcaagtcaactagagctttgcttaggtttcccaccctagggccactgtggggaagcccaggccttctctggtgaccaaaacgatgtgagccaggaactgctggcagctgtggttacagctttgctaatctgagagaagctaatacaaaagagagagagagagagagagagagagagagagagagagagagagagacccgaccacgtggcaccagtcatctccgagtctcctgaggtctcgtcaccagagaaagaatcccttaattctagccaaccttctgcactgaagcttttcttcaaatgagtgactcatataggtttctcatcgtctgccaaaatcacaatccagcagcagagtttggggctcctccggggaagaaatcaggggctctccagaagccagagtcagatggacatcccatgcaatggattcccaggactccccatagccccagtgggagctatggaacattgttcccaggtgttggtgttttcttttccctccaggcagcctggattcttccttctttcccgcctagatgtcggtttctattgagatccgaatatactaggctcgaagttcccttaacacagccttcttggatctcatgtaatctgctgtcagtgcagttactcccctggactgcagcctagtacacgtggaagccaagatctgaactattgctctgagatctccaggaatactgcttccttccttccttcttcctatgtctgagtgaactggattccttgaactcttctgagggatgacatcagtgtctttcagatggggaaaaaagcatagctctgtgcctagtcatgcttgcctcctcagctgtgaggcacacacaacagtcccctggagacaggggccaagtggggctgagtagcagctgctccagtgttcatgactccagagttgattaggtaggtgagggaaagcatgttcctgacagctctgttgccaacccaagagtctgacctgaatggtgtcccctagaagcttcaacttgagcttttccgtaccttgtgaaccagctgagaacagtttgaaacattcaaataaaactttactaaacatccctgggcaataaaaggaaaataagcagacaagggaatgagaagctaggttttcagcatatattctcagctctttctcagagctccaagaaccagtctcaggtgacacagcgggggcctgaggagcctgtcctcccgtcatgctcttcttcctcactcacctttgattttttttttttttttttcctgtctcctggagggaaaccctaaagtataccaatcgagcagttaggaggagttctggtatgccgaaacttaggatccgagaagccatcagagcgctgaccaacgtgagatcctggattaaactcttgtggctggaatgagcgtttcaatcaacacatttttcccttggtgcagcagccactgctctacccaaacacaggagaagcacttgaagaatttgtaacaaaaccaattaccaattatcataaatttagtgaccttcaaacagtaatcatgggatgcaggtgtaactcaggggcagaatgcattagcgtgtatgaggccctaggttcaatacctaacaaaaacaaaccaaaattatttcttattattctgtggattaattgggcacttattttggactaggtcagctcagcaggcgttggttagtatagaattgcttttcatggtcttcgggttgagtggttcagcttgactaaccccattctcgtctacacagccaggcagagcagctcaggcttcttcatggcatctcagttttccaatgagcagtaagaaaggacagatcccagtgcgtgaatctgacacaaaacttcgcttctgtgacattagctattgtaccactggcccaaataaatcatatgggcaaagtttagcagcagtgtgacagtggccaaagatatggatactgggagggacatcaccatgaccagctaggatggagagaaaggtaagaagaaggaggctgatccacatactgttggcgctgggacttcctttgccccagacttttttcctgctgaggagagcaggatgctggcacgagctcagcttccaacagcaccaggcatctgtggaagtccctcaggctatatttgggcctgtagaaacactactctcagaggtttctgctttctgttctttgtaaacctcatcaccaaaggaagcctttcccttccttaccattcctcacagatctttgtccttgtttatctacatctgctctcctcacctagaggctccatcccctctctctaactccgggctttgtacagtttgggtttggtggccaccagtgattccaccctggtgccttccagaaataaagtcgtcttcctgatatctcagagccaggacatgagttggtcctgatcagctacaggacttcctcactctggctcaggatgaccaaccactgccaaccacccaaaccgggccagtctcaatcctgccttgctttgggctcacagtgctgtatatagttctttgaagctggatctatatacagtggaaagagaaagtcaaaacaaagacatctgcaagcacagctaggagatggaggtggtggtgaccctgattgagccccccagaactaattagcctggagggcacacttggatgaacataatcgctacactgcttttggcagctgattctgttattgatcccagaatcttaacgaaaacaaataaacaacaaacaaacaaaaacaaacaaaaaactgctccctgcatcttccatagatcaaagctgaaaagttcttttgatgagggaaatattaacagtggaaggggcttagttagccactggttccagcgcctccctgcactgttgcctattctcttaggaggaaccccctgagagccttgtgtctgaaggctccatggcaggcagagagggtgcagtgtagaaatcaaactgctccttcccagtatctctacacatttacaatcaccagctcgcctgcttccattccattcttggctcaccctcttccggtctagagcagttgttctggaaggctctactgagtcacacctgacataaactatgaacttagccagtgacatcagctttcaaaattaaacacagtctagtgcttaggataccagaggagcatgaagaatcacaggccagcatccttaggaattgcttcttaacttaatttgggcattgtgcagcgggataagaatgccaagtcagacttgctattagagggaggcccgaggatataaataactcaaggcaagttaagaaccactatctcattaataataggagagaaaacagagtgaaaaactggaaggaaaagaccagactgtgaacttttgaagggaaatattgtttgcaagtgagagacactgaataaaatcaagtccaatgagcttctcagtgaaggcgacgttataaaaagcacacaaaacagaaaccatttacagaaagcaaattatgagccaggcagtggtggcacctgcctttaatcccagaaaggaaaaaaaatgaggtgtttgacagagataaaatggcaactgactaacactggaaaacctgaatgggaagctgggctctatttagggtctttttctgaaatataattgtattcatctatgataaagtttaaatgagtatttaaatcccaagcctttcacaagaatgtaaatgaaggaatccatgctctttgcaaagagtttggtggatctcatcctaaattaagagttgcatgtttgctctgcaaacaaccaaagctaaagacagcacaggcttgccctaggattatgtattccctccctactttatgtgatacgaatcagaaagttaagaaagagaacgtagacatttctcaaaagacatttaaaaatgtatatgggggactggagagatggctgggtggttcagagtgagggccgctcttgcagagaacccaaattctattcccagaactgagatccagtttcagggggatctgacacgcccgtatgaatcgattcacaggtacagtcctagcattagtgtggagattcattgaactcatttgttgagtcctcttcaccaaatgtacaaggtaggtcctggtgatcggacgtctgcctaggagggggttgctaatggcttggagcatgggaatggattttaatttgggagcatggtatagctgtgctagttacgtttcctaagtgatagtcaggctcttatctcttttttctttcctacttcgggagactgaatccatggcaggctctactgagttataccccggctccctcccttcctcccccagccctttccattccactgactcggtttctcttcctttctctgttttgatatagcatctcatataggccaagttaccctaatcttgttcctgtggctaaagacaactttgagcttgtgttcctcctgcctctacttcactagtgtgtgatgacaggcatgcttgaaagtaaaatgaaacagatctactttgggctgtggaactagtccttctcatctactagttacaaattcttctcacatacgaagcgtgtctatgtccaatcccattaaaggagtatttgtacagaggatagaaatgagactaaaattcttccctctggggccttttcttttctttcttttttcttttctttttcttttgcagcgctaggcagtcagacccagcaccatgcgcatgctcacctgcaacagctttcatcttattgttgttatttgtttgttcatcagttcatttacaagtacggtattcagccaggaaagggctccacctctccctacataagagtccggtatcactattgacttcatcctgaggtggcactaaagattagttaaagctaacagcccaggctggcctcattctggatttatctgttactgcagaggacattgaacccctgtgtggtgacattttgtttataaccaaacaaataaagcttgcttgaggatcagagcgcagagctagccacagtagttagccacagaggccaggcagtggtgggacacacctttaatcagacactccagagacagagtgagttcaaggccacctgggctacacggaattgaatctgtctaaaagagaaacagagctcacacaaaggtgatcggagcacttgggatcacacacctttaatcctaggactagggaggtggtgacaggaatgatatagctgggcagaggactataaggcgggaggcgccaagagagatgcagtctctcagacagcctgagcattcagcctgagatttgtggagacgggatggccccttcagtctgaggattcagtaaaggtcaaaggtctctctggtggctatctgcactgcttctctgatccctcagctttcaccccctaatatctgtctccctgtttttattattaagaccaaagagaaattgtgctacacccctggtctctcttcctctgcctcctgagcactgagacaacaagcctgcaaagccacagcaatttaaaggtaattttcaaactagaacttggttaggttgtcacggtatcaacagttttttgttttcgttttcaaaggatttttaatgaactgtgaaccctatctgaaagacaaaaagctacaaaagaggtagtgttaagtagtgtgagttacttttggggaaagttgttcaggatatatcctagtggtaccatctttcttctctactgtaattagccaggaaataatctttattaacatttcttttgaccaccttttgaggaaatactccaaggtcagtggtcatctgatcataatatctatgaaaaccgcctggtagtccatcaagtttgattactgtaaacagaagtcaattcaatgtagggaaaaatacaatccttttgtttttttcctcaggctacctgctagatttcagggttcagaattagattatggccatagttgtttgtaaccattttctaaagcacggtggtggcttgcttagtgtctagaaatggacccacattcattaacacaataatggctgaattttgtagaaatgatgcattgtgctgtctagaatatgacctctactaattaaataacataactccatcctggctgtgggaatctcctgccaagtctaagcactgtcgagctgaaagaagatgtgaagttaagcaaatcaatcccgatttagacaggagagggatgagaaatggagttagatgacaaatgggaagaatcacaaatgacagagaggccaatcatttcttctaatgtcttcgggttcagtttctgaactgagactatatgtgggcagctaaggtggctcaaagagcagtaataaaaacatctggaatcccgctggaatgtcatgctctatattattttcccaccattttgtggggggagggaacaaaaatttcactacgaattgccagaaaataaagtagtgctatatgcttaaggtatacaatgaagttcattccaagttacattttcatgcatcccaggtaactccagggagaactttcttccaggggatgagggaggggaaggccttgagccctgaacagtgattttctgactgtgcaggagcgttagtcctgcttcctcctcaagtccataaaaggagggcaagcctgctgatgctatcagatgcatttaaatgaggtctgctctaggggaacctgagagaggctgactccatagccagcagcagaagcaaagctttctttgatttccatctgcgtgcacactgcctacagctgggggtggggtgggggtggcaatctgccttaccaaatgagggcaaaaagtctctgtgaggaaaagttgagatccatacattctgttaggaagaaagtttgaggtgggaacggagctgtagttagtggttgagtgtactagggcttagcatgagcaagacccagggttagatcacaagcgtattaatgtaaatgcatgaatctgtggacacagagctgtatattcactcatttactctttcattcagctttcaaatatccaggtccctacatgatgggtcagggttgtttgatgggcaaccgttatagagttcaaatcattcccaaagacttgaatgattcagtcaagccgactccaatgtttaagtacggtgtagggttatgagaagacaatctgcttgacttctttccttggtgaactcttatgcacaccacaggaagtaagtgtgatgtgggaggagagacaatgggccaagagctggaaatcctgcctttgagtgatgttctacctatcgcaaaggtacttggtgccgacaacggacaagtttcttaacctctctggctcaaatggtcctcttacaagtgagtgagcagcttaagattcccctcatctctagaattcttttattctatacagtaacgcaatccacgaagtttcccctgtgaccagaattagtctgtttctagctcgtttcctttttgccctctttcaatgttagaccaaatatgaacaagaagtattattttgtcagagctaacaaactgcccttccacaaaatgacctttgggggtcaggtcagccaacaaaagatctaaatccaaaggcaatggtcagaccaactatgagctggcaggctgccattccaaaggatggaaatgggtgtaggcagccaacattcttggctggtgcatttttaataaacacagaaaacaagaatagcattttcctctcggatcacttaatttggtacccatgccactgggacatggacaggataaagatgaggtacaatttatttagaacaggatggatttacttttacaaatgagaagccggttatgacatcatttgtgaggaatttttattggtgtttcttgtctctgacaagaaatagtttgagtcattgcagcggtatctccacctctttggctgtgttgacttccatctgaaacatgctctgttgcctttcctgtactggtttgaatggtctaaggaaagctggtgtgacttatggttgttatgtgtcctacttttttccccaagatgattcaatatacattactactcttttttaaaatcaagaataaaggcttccacagcacatgttctttaacttgttgaatacttgaggtgcaagtactttaaacaacagtgatttatacaaagatggctcaccttacattcattttctttctttcctttttttttttttttccctgaggcagggtttctctggggctttgaagcctgtcctgaaactagctcttgtagacctggctggccttgaactgacaagagttctgcctgcctctgcctccggagtgctgggattaagggcgtgagccaccaaacctggcttgcgcctcacatttgagatgttttccaatcatggaatcatggttattgcactaataatgcatgggattgcttcatatgtatatttctctgtctcttctcgtcatatggcaacaaggacatttgactgacaaggctgttttctgttcagtccttggagatccttgaataaaaagctctgtgatggcaagctgtaattagctgtgtgggtggaaattagtgttcttcaagcacaccatgtttagggcagaggcaccgtgctttttactacccgaggccaccctggtcctgtgccacagcgctaggtcactgcttcttgtaggcttccttccaaaaagcacgttgtctttgttgagctctgaaaccaggaggcttttcatagttaaaaacaggttatactgtcctgcagacaagtcaggcattgaccaagggatgactataatatgttcacttctcatttgaaagtgcacatattcccagcattcataagtatcttctgaatcgtagcccgtttcataaggaacatcaaacttttgaatggattcctgcagcactggtaggtcctccattttggatgcaataggaaatcccgtagcaggaaaaaacctttctctcctagtgcagtcatcttgaatacctcacacacaagcgggctatgtgtccagtttaaatttttattacatcatcggattttttttttatattcccccacccccttctacaaatccgggcttcccagacgcccccctgcccctgcatctgactgtaacacagtattttccatccaccttttcaaggaggtgagctccagactaggtgaaagacagagcatttaaaattatcctcggttcccatccctccccgcccccggccgggattccctttcggctggtgacgacagaaagggttcccgcggctgcacaggcttctgcgtgcttcgggctaccgcgtttcccgacaccgacaccacgcgttagctccgcgcgttagctgcgcgcctgtgtgtgtgtgtgtgtctgtgtgtgtgtctgtgtgtgtgtgtcgtctgtgtatgagcttgtctgtatgtgtgtgtgtccgtgtgagtgtatgtgtgtgagcgtgtgtgtgtctctgtgtgtgtgcgtgtatggggtgtgtctgtgtgtgtgtgtctgtctgtccgtgtgtgagtgtgtatgtgtgcgtgtatggggtgtctgtccgtgtgtgagtgtgtgtgtccgcggccacccgcgtaccgtgcgcctcggccgggtccccgggtccccacgctcggggggtcctcggtcgggagctcggggacgccgatgaccacgtcttgcgtgttcgggactcccttacaccccgcccctcaccgggagggggagtcgcgccgcagcgggggcgcgcaggggacgacgacgacgacgacgatcgcgggatgcctgcccgcgcgcccgagtcccctccgcgatcgcaggcgcctggctagtcacgcctccccgcgccccgctccgctccgctcagctccgctccgctcggctcctcagcctccgggccgcgggaggagagcgaggtcaagggcggcgcgggcgccgggggcgcggagcggggtgggcggccacaaagcgcctcagtcgcctcagccctcccgcagcccctcgcgcgcgcggcccctcgcccgggggcggcggcgggcgggaggagggaggggagggagcgggcggcgcgggagcggcgggggcggcgggaggagggcggcgcctgcgtgctcctccccgccccgcccccggcgcccgcggcgagcccggctctcctcccgcggctgcagcagctgccggttgctcgctcacggcctcggcggcgcggcggcggcggcggacagcgcgctcggagcggcctgtggagcggacggacgagcggacgacggacgggcgggcgggcgcgcggccccggcggctcccgtctgaggcgaaggacgaggctcggcggggaggaggcggcggccgccggggacccactcggcgggcgcctcggccccctcgccccctcctcagccccgcggtcgctcgcgctcggcgggccggcgcctcgcctctgcgcgcggagatggtgtagcccggacgccgaagccggagccgcctctgctcgcgcgtccccgcggcgtccgcctccccgcccgaggagagacccttctccgctcggcgtctcccgcgccggggaagcctcggcgccgccggcaccatgaggtgaggggcgcgcgggccgccagccattgtgccgcggcgccgccaccgctctgcgcggacccgcctgcccccggcccccgggcggcccgcggctctcccggctcttccccgctcccttttgtcccttcgggcttcgcctccccccgcccggcccgccccgcccgggcgctcgctcgcccgcccgggctccggggctccgggctctgggggagggggtcctgcggtgttggctcggatgctgccctctcacccaggatttcccttccccgatgcaacgagcctgctcccgccgtccctccctccctccctccctcccccagcctcggctggcgaagcccaggagatggggaggggctcgggagtcgtagcgtgcttgttgccgagagacaggtattttccgtgtggatgtaaaaattccctgcactttcagtacaaagctctagtgtttaattaaaaaaaaagggggggtgagtgggtgggggaggaaagtttgaagggtccgagatctctgcggggaataaagtgcctcctccggtcggggtgagccgaggagcggagaaaggtgaatttcccggtggtgggggaagggagagaatttactaggtttccactggcgggggacagtgaaaggctgggataagttgtttgaggtctgtgagcccgggcgggggagggttttgtttggaaagcccttctctcccgttctgtagcaagcagcaggctgtgttgcattgcagcagtagcagccgcttttcccttccctctgtaatcaatacaacaattattatcttttttcagccccaaaggaaagacttggatgtaccgtcgtgaaatgctttttgattgatacgatggaacatatggtgtgatattttccgtttttttttttttgtttctccagttgtgtaggagaataaaccatgatgtggtgtgtcatccattggaggaccggacacccccacccccccagcctttcctaagcttgttttgtgtccattacctcctggttttggattggtgcaagacttagtgagaaacgggacctggtagactgaaggctgatccattttgcgttatcatccttaaaggccttccttttaggttaaacaattgtgggtgaagtaaatgactccatttctttctcccgagacagtctttcagttcgtttggattagaatctcctttgtgttaaagattaatggccaaccgttgccaagacctttataatgtaagggccatgagatttgaatgataaaattacaaattacttctctttggcatgaaaatgtaatgtcactggaatttttccccctcattttaagtaagttccgttttaaactttagtttttatgtacccctccccccaaatcggggttgaacacagttccgtctcactttttccgtgtgttgagttcacttaagactactatgaatttttccgattccagtggcagatctttctttatgctaatcttagatttttgattaatgcttactgatccttttcatcagtgacttcacacaagctatttcaaatgtttaaaaagtgattatggcctacaaaccagaaaccaagatttatctttataaaatgcagggtgagaaactaaagttatatttttttgcgtttttctcaagctattagtggccttgaaaattcaggaactgttaacaaaatacatgactgctctgtcatgttatgtattgttgatggctaattcaatgacttaatgctatagaagtcttatagaacaagttagtaattttttcagacttgatataattttcttagcactaaaactacaaagtagggtattttaacattcgatcaaagttatctgaaagattatgaacaaaataaggtgaagtttgaagtatttggtaaaacttaaataccatacattgtctgcctcaggtagattatatctggacttacaagttctagtttccaataaaatgtaacatttttaagcttgttttcttgctgtacagaggtagagaaatcacactgctgtatttccagtagcataaacagggaacatcctcccaggtctaaggattttgagctgtccacagtaagtctttgtaggctgattttgcataatttaagagcagcaaagaggatcagctagtttttcactttgaaaggctttgggttgtttggtaggtggtgtgtacagcttgagcctgaggagttacttggttagttctgagggtaggatgacttggtggagtgtaaggcttgggcatgaatagctatttagatagctctgagggtaggatggcttgttgtaaggtaaagattccactgctgaaagcagctatgggaatattttggtgcttaagaaaggacttttgcactggggattggtggctcatgcctttaatcccagcactgtggaggcagaggcagacagatctctgtgagttcaaggccagcctggtctatagatcgagttccaggacagcctccaaaactacatagagaaaccctgtcttgaacccccctcccccccaaaaaagaaaggacttttgcttgtgtttgtttaatctcagatgctgtaggaactaaatgttaaccttttagtggattctttaaaagttagatgaaggatagtttttgtgttcaaagaccatccagaaataggaatattgagtaggcatttctatttaagttgggcacaactctgaagaaaataagtatcttaccatattgagtatttgtggtaagatcgctcagatattttaattttaggagcagcatgttattgtcacatagtgtaatcttatacagaagggagctaaatactttacattcctgaaagtcgtaagtcacactccacatttaaatgctgtatatagatttgttaaattttgattagaggtggacagtaaaaaaaaaaaatagtttagtatttacacaggacagtggaaagagttgaggggaaaaaaagccacaaacccccagataccagctggcacttgtaatagcctgagtttttggttctgttctttgatttgtgtaatgtttcaaaagtataagattctttgtgattgagaagtgcatgtttgggatttatcttgtaaacactggttgaacactcaaaattttaccttttactcttttttttttttgcagaaagaagaacttgttagagttaaaatacttattagttctttatagtctgatctctaggaagagtttcagaaaattttggattgacatttttgtgtcatattgtatggtccgggctactggaacactagatactcagaccttctcatgtaaaaaaccgtgatggggttgtgaggatttgaccaaagctacttactgagtgaccttgagccaaacatatactttaactgacacacatacgcattgttacatatcactcatacaaatcagtggtatatatcagtatatatgtatatatagttgcatgtagtttatttgttggctttttgagacagggtgtcaggtattctctgctggcctcagactcaaatgtatgactgagggatgatgaccttaattctttctgattttcccacctctaccaccagaatgcttctgaagacattcacagctttatgctgtgccgggaattgctatgcagagcttgctacaagctagacaagcattctgcccactgaatacatctgtacccccagtatgtagagaggtagttctttactgatttgtgaggatcagacaacagaaagaacagatttttctttcttactttgtgaggctcctttgttttgaggttaaaatcttacttcttttagactagttgcacaaaagtttgcttcaccattgaccttatttaaggatgtcaagtaggttacattttgctaatgtggtccagtaggtatcaactaaaatgcagataagggcattgatacatttctgggattggtgaggaagaatgccatgtattccttagcagtatttgcttgagatatgggttccggagggtgactactggactgctatttatcaaactgtttcatgctcagttgtatggttaggtgaggaaacttttttccagctttcttcatgtgtgtgttttggtctttgaaactttttatgggttgtgttaccttaattcacagtaatggtaaatttactacacatttgagaggagtacagtcaaggaacagaaaattcaggttgtctgtactttcttgttaaatgagtctgttgagggttgtagtttcaagttctatgtccatggaagaatgaaaatagcagtctcccctgccatgggtctccatttatgcctgcagctgttgactcttccacagatacttatttcagaagtaggagccacctcttcaggttttttgaatgtcaatataggtattaagtgaataaagcttgaatatgagtgaagataagtagataaaatttacttaactttatatagtatttagggttttgggtatcttaattaatccatttggaataagcaaaataattaggcaggcaccatttggcccttaaagaggaaattccattgttttaatattttatcctacatacaactttacatcagtgattattgtataactttcaaaatgccaagtctttattgtgagagtaaggaagtgttgaaaaaggagtgtcagttttatgtggttgtgggttagtaaatagatacttaagccctcctttctcccccttctataccttctttgaaattaatgggtagaactggggggagtaaaacttaaagatgatctgagttgaggaccataggagatgtttctccaaatacaagtttgagaactttgctttatggaagaacacaaagagccaagggtcttccctgtgatagataccatctgagaagtagtctgtaaattgccgttttttttttttttttttttttcttcttctttggtactaaaggatctaatactctactcccaagtcataccaccagcccaaagtttctggattttcatatcagtgttactagtaaaatacttggcaaatactgtctatatccgaatgtgtttgactttgactggtattcctttagaatcttccattctaacagtaatagtcacagttttggagtgccttgtaacattctagaactgtactgggtacaactccagtaggatgtggtatagtatttgcagatataagtactaatattacttaaacaaaaaccggcatcacgactacaagatggatgtagaatttgtttcttactcattaccaaagctcagaagtagccagagcctcagattcaggtttgtcttcccccagagccctttggaccatatttctgccaacagatagaagagtcgtctgttttttagtgtctgatcagagatttaagcagattgatttagcttgtgtccacagcactatttgccggtctccttttcagggtttggtagttgatgataatacatgacattagactattttctcaaagctggacagtggaagtttagggccagtggggtgtgttgggggctcttttttgtcccttggtggggtgggagtggggttaggaggtaggctagagatttttctttcttaaagagccatcagtctcactggcttcagctcacttagttgtacttacctcctaaaggctctacctccaaatgtagttacatgctggcttaggacatcatcggtataaactgggaagacaccattcagtctgtatagcacagcatacttgcatgttggtgggggaaaaggtgatgtgtgtgtaacgtttgtactaatcatagataattaactggaaataattttttaaagaaaagtacgtatagggagctaatataactaagtcatttagctttttaggaatgtgtttgtattgggaagtttccatattagaatttgcatccttttgatatgaaactgtgtgtctaagtgttaagtaagtggtgtggtgagaaatggcatggtgcagagtaaagaatactgactctggagtaagtggtgtggtgtgagaaatggcatggtgcagagtaaagaatactgactctggagtaagtggtgtggtgtgagatggcatggtgcagagtaaagaatactgactctggagtcaatggtgtggtgtgagatggcatgttgcagagtaaagaatactgactctggagtaaacggtgtggtgtgagatggcatggtgtggagtaaagaatactgactctggagtcagctctggattcacagtctagttttgacatttaataactgatttttaagacgtttgaactttttatttagatttgaatttcttctgtaaaattgaaataatttctgcttttcagagttgttgggaagattaaataagactctggcataacacttggcacacgaaaatgggcttgataagaagactaaatccttcctctaggaaaatctaacatcttttatgttaagaatttgaaaagggcccaggatggtgacgcacgcctttgatcccagtactcaggaggcagaggcagactgatctctctgagttcaaggccaccctaatctacagagttccaggacagctagggctacaaagagaaaccctgtctcaaaaacaaaaatggagtattgatacatttcaccatgtggatggagacatgttaagagaaggaagctagatccgaaagaccacatactccatgattctgttaatgtattagtggttgcccggagtgagggaggaatgggaagtttgctgtatgttatgagtctggttgtgccaaccccacccctggatttttgagacagggtttcatgtttgctgtcctggaattcagagatctgcctgcctctgcctctgcctctgcctcctaggactaaaggtgtgcaccaccaccgaccacctagcccagtgccttctttttgacacagtgagaatgttaaatcagtacaaccttgtgtatatattaaaaggtgaattttgtagtgtcttgagttacaggtcaatgtctacccccaggccttagattgtttgtgtttatttttttactagaatagacagtaccaaaaaataatctcatctgtttcttatttttacccctgacacttttattcctttgaattaatattggcgtcttcatgtttacttaagagagactggagaaataacactgggttgtcttttctggggagccagctatgcgaatgcttagattgaaaccttgacagtgatacctttcagaagcctgggcaagttatagagtatatattactgctaaattaatagtagttagttccctggttacagataaaagtgacaggctgtccagatggctcagcaggtctaaaggtgcctgccacccagcctgatgaccttcgtctgctcctgtgaccctcatggaaagaacacttctgcaggttatgctctgacttcattttgtgcctgtggcacacaccccaccccaaaaataaattaaaaaaaaatttaagtcctaaaaaaaaacgaatcaatgactaaaatccacccaaaaatgtgataaagcacatctataggctctttagagaaatgtttagtctgagtggtgttttccttgagtctgtttacagtaatctcagataccaatgagagttttgtctttggggaacaagatagccgtggtgacatttttaaacaaactgagtacttttccagtggaaaaggcctgctggaatacctgatcttggtaataatgatggcatgaattcaaaatgactgccctctactgttctttagaagctctctattttctgtactttttggtatctctgtcatattgtcaatttgacaggggagaggctttagaaaaagaactccagaacataaataaaatgaatagtcttaggtcaactctcaagggagtccaaattgctctatttacggttcagtgaagggctggctcttcctgttaaggctgtgtagttactctgtattggttaggtgttagttttgatctctaatcctgagaggtcatcattcccccccccccatattttcaccttatgtcaggttattataagcaaaactgtaactatttaactttttttgttttgtttttcaagataggttttccctgtgtatccctggttttcctggaactcgtctataaaccaggctagtctcaaacttggagatctgcctgcctgtgtctcctgaatgaggggatcaaaggtgtgcaccaccacacccggcttcagctttttaagatttatgcatctacgcatcttaatattaatttaatatagttctttataatctagttacttgtattttagaaagtgaacaaattactatccaaataaataatgatttaaagtataaagatgttaaacactcagattcaaactaaatagaattgtgtatttatgtgtgatctacttgtgtctgcacagtttgtattcacatgtggaggtcagaggtcagcttctggtgtcttccgttattctaattttttttgtttgtttgttttttgttttttgagatgggacctcacactgaaccaggaattcatctatttgactaggctgactggctaatgagcttcaggaatacacttgtttcttttcccagcaatgcagttagctgactgttaagtgggtactgggaatccaaattcaggtctttatacttcaatagcaggcttttaaaaacctgatcattcattctttttaggttttttaggacagggtttctctttgtagctttgactgtcctggaactcactctgtagaccatgctggtatccgactcagagagacctgtctgcttctgcctcccaagtgctgggattaaagatgtgtgtaccacctcctcccttgaattaccaggttttgaaacacattatataattagtaagttagttagagtttcagtttcctcatatctggccagttcatcataattagtcttcttaatctttgtcagtctggtaggcaaacgtgttatcttagtgtgtgtgtatgtatatacactagtaggatagaatatctcttcatgtgcttaggttaggtatctgtctttgagtatctgttcatgtgctatttcctggacaggattagtttttcccacgattcatatatttttaaggataccagtcttttatagtgcatgtctaatgtacctattaactattattttttaacaagccacctcgaaatctagtattaagtgtatttgtttgctgagtagtaagtctggtcttactaaatctgctgtattatttttcattcacttagctggtcttctagtttcatctctgttgctgtattaaatattctgcccaaaaacagtttgtgggaggagtgtgttatttcagtttataggttacagttccatcattgagggaactcaggcaggagcttgaagcaaaaaccacagagaaatgctgcttcttgtctcacttgcctagggaatgacaccacccttggtgggctgggctgtctgccatcagttaacagtccagataatcttccacaggcctctcaggtgattaggctgtgtcaaattggcatctctgagacaggaaaacaatatccttaattccagtgtgcatacatatccagcctctccttgcatcctatttgtttttattttctaggccaaagtaagtcatgttttcaagcctagagtataaatatggatggagactacatacagatcatgaggtattactaaaatctgctatgggtgtcttctgaatttgtctccttttacttttgcttggtttcagaaattttgaagttccttgtcaaatttcatgtgtagttcatctttatagtttctctctttgtttttttcatgctttctgtaacctaaaagtagattcagagttgcctataattctgttgcttttatagtttcattggtatttaatttaaacatcaggaattaattttggagtaagtaaaagtttcctaactatgaactatgcaatcagtcaatagcgcttattgaataacccatccttctgtagacttgaaatattatattcattgtagattgaatttccataagtatttgattttgtttctggactcactggcacctaactccgtgccattttgtttttgttctatagtggcagtgacccaggcatgtgtcaagtactctgccatggtctacttctcactattgagccattccaacttcacagtacctttttaaaaattgtttatttttgtcttatgtacatcagtgttttgcctgcaggtatgtttgtatgagggtatcagattccctggaacaaagttatagacagttgggaactgccatgtggatgctggtaattgaacctgggtcctctggaagagcatccagtgctctttactgctgagccaacactccagcccccttcacaataccttttaatcagcgaaaggaagatgttctttagttttcaaattttgatttgcttttcttttttctgttttcaaattgactttagaataattttgtcaaaactagtaaaaatgaaataactccttgattcccaaacctgttctgattttaattagaatcacatgaaactgatggattaatgtggttggagagcatagtgaccctttataatttcaccccccatttagattttctgtcatctttagaaagtacagcgacatactttcttttaaggttcacatagcatataaagaggtttttttgttttgttttgttttgttttttgttttttgtttttgagagaggcccttgctgtaaagtgcaaggctagtatggaacttacagccaggctggcctcaaacgtcttcctaccgaagcttccccaggctgggattgcaggagtgtgtcttcaggccagatgactttttatgtgttttttggagaccgtctaacagcctaggctgatgaagctcaagttggcctagaaattgggatctttctctcttagccttcaggcttctgggactatcagcatgtgtctttgtttaattttatataattttttgtatttacattttaaagcataaatcttgtgtttagaaaaaaatttcctttgctaattaattccattgttagcatttatagtctctctcttttttttaaagagtttaaaaaaaaatgtagtatcaaaatgttaatggagtactaacgacctgaaaacttactgtgtgaattcagttgatattgcttgggcagctgaaagctagggactgttaaccccatttttgtgggtgaggaaatagagacagagacagctaagtttttctcaaggtcacctaaacagttctcagtggaacttatgtttttttttctgccgagagtcttggtttttactagtaagctcttgggtttgtctgtaattgttaactttcactgattggcacttttatgtttggtgaataatttttatcttgctatttcatgtataagggctgtataatttcttcaaataattggtataagaacaaggccatgtagaatgaattagcctagaacatttcatagataacagtacattgcagagatggggagaaatggcttcatttgcacttaatcttgaaaaatgaaacaaaattatgaaaactttgaaattatggttgcaactatgttacattgttagaatgcaagaataatgaagcaagtgttggttgttttaatatttttcataattttctgacaaaattgcaaagtatcaacaaaccaaaattttcatgctgtggtgaacttttttaatacgataaactcatttttgctaagatacttaagatacttgctttactaaggattttattttgtattttgttttttagatcatagtcagatctttgttagttgtttccagttgtgaagcaagtatgtcatgtaaccttaagtgctttttaaacattaagagattgttctgtgacatgcttgagaggccaagaaaggaagatgttaagttcaaggccctggttctatagtgggttccaagttagccttgtctgttcaaaagaaaactaaagcctaaacaagcaaataaaaaagagaaagaaaaaaaattatttcatataattggaagtctagaggtagagtgccctcacttagcacacaatggcgtgctccctgactactgaggacccaggcctcttgtcatttgtggtgtccactttatctttaccatgctgtgtaggtcatgggatctccgtgctgcaaattcagctgggtaagtcttggagaaagtggaactattcttggttcccattcaaaccccttaaggcagtgattctcaacctgtggcttaagggattccacatatcagatagttacattacgattcacaatagtagtgaaattatagttatgaagtagtgaaataaataataatttatgtttgggggtcatcacaacatgaggaactgtatgaaagagtcacaacattaggaaggctgagaactttaagatataataaagttcactgctgaaatgacaggagaacatacagctgaagctgtcagctatgctgggatgtagaatgaactcttaagtccctcatcctcttctcagtcactatacttagtttcatttttgtcaggagctttgcattaataagaaatagttttcattgacttcataaaggattgtgcttttgaaaggtttgcacttttcctctgtagatggtttgcattgtgtggcttggagtagaaataactgtgatggagagactgactgtgcaggggtgaggtggtggagcctctgcagaggctgtgccccctgggaaggtatatttaaaggtagcaagtttgtttttatgaacgcttagttcttctttgaggatctccttttcctttctggcaaactctgggagtctactaaacatccttttaagacccttttatctgttttgtcccctcttacattttcatagatgcgttgttctgaatcatttattgaattggtctattattcctatcttgtctgtcatctctacagtagtcatatctttctgattcagattttattagctcagcttcatcctttgcagacctccgtatcttctgtgtttcttagaattaaaaactaactttttgttatcatggcctaagtcctacttgattgcttccactctgtgattccagagttagtagagtagtccagtaaggtaaatcccaaaatgacgtacaaagacagcttggaaattactcattcccttgtacttggcttctgttttcaagagctgtaaagaaaaatcctttatactgagggtagggactgtcttacatatttatggttgatttccttctaagaagtaccagtcacacatgctatttaaacttcctatagtatttatatctcttaattatagtaaattgttagtgttactgtgttttcatttaaaagttttgagttttggagctggattgaacccagtaccttgcttagcatgtccttggtatttttaattgtcgaatcatagttatattacatatttagagtacagtaggatgtttgatacatattgtatatgatgtggaatgattaaataaaaccagttagctttcaccttgcttgatgtgattttgtgatggtatatttgaagttgactgttgtgaaatgtatggtcttattgacttagggtcagcctgccgtgcagtaggtctcatgccaccgctattttgtattgcctcagtaaagtgcattttgttctgctttaagggaattgcctttaaatgccatcttttaacattgtatgttctaaagatggaatttttccatcttggggacaggtattcaagtttaatagaattgtgtctgggaaggacagcaagatggctcagtaggtaaaggtggttgctgcaaatctgatgatctgggttcaatccccagagcatatgggataaaagagaagaactacaagttaccctctgacctttctatataagagtgtctggtgggcactcacacacaaacaagctttaaaaaattaaagaacattgtctttgagaccttgcctatcccaaatctcaatttctttcctccttaaattaggattaataattaattgccatatttttgagacttaaccatattaagtttagaagatttctgtatttagaatttgtgtgtgtgtgtgtgtgtgtgtgtgtgcgcgcgcgcgcgcgcgcgcgcgcgcgcgcatggggggggagggggaaggaaagggaggggtggagggagaatctgaattgtataaagcagaacagtagactgggaacacaagagttggtgttgctcagtaataaaatacatgtttcacatgtgcaaaacctgggttcaaccccagcacctgagggtgttagaaaaagcagtaagttgattttaaatcttgagtctgaaatttgtggataggcctagtatgctaggaagtcagataggattcctgtgttctttgggttttctagcttctggtctttgctcggattccttgcttgtagataaatacctttactttctgcttctctggtcatgtaattttgcctctattaacgtgatgcccccattgtttgaggcagggcctcactatatatatgcatcccaagtactttagcttctcaagtactagtgttacaagtgtgtgataccattttccttttctaagaattccagccatataggattaagggcctaaccttgtgtcccttctgtagtgaccctgctgataaacaaggtcttattctgagacacttcctaagtcctagcctgagtttcccatttggatacatatcacagcgtttatctcattcattgctcactttggttagacaagttgtttcatgacagatatagaaggaaatttgtgtatatgtctttaaaaaatacacacaaagagtcaggataaagctactagctctaataaatgcagagttggagggtctgagatcacacaaagttttctttctatataccagcaataaaacattgaaaaagagaaattaagaaaattattttcatttgcacaagcatcaaaaggaatgaaatgccaaggagtaaatttaatcaaggagttaaaatttgtatcctaaaactgagaattttctggaagaaacaaaagatttacataaataaaaatactggtaccacaaatgatagatatgaatactgccatcctgtcaaaatcccagtgacattctttgtaatccaaaattgatagtggaatttcaagggacccaaaataaccctaaaaagccaaattagaagatctatatatccagttccaaaacttacctaaatgggctggtgggatggctccactggtcagtacatttgcttccaacattgatgacctgagttcaatccccaggactcacatggaagaagagaaattgactgccttttgtatattttaattttcacaatgtaccctctgcacacacacataaaactagtattttttaaaaatcttactaaaatattatagtgatcaagatattccactggcataaagatagacctatagaccagtgaatagaagagaatccaaaaataaactctcaggtacacagttcagtctatttccatcaagagtgaaaagcttgctgggtctgttgacttagacctgtaattctaacactagggaggatgagacaggaggaggtttgttgctagtttgaggccagcttgagctacagaatgagaccatcttactttaaacatttcccccaaaacaaagcaaccaaaggaacaaacagcacaagaaaggcaggaagagtgataagattatttagtggggaaagattatcttctttttaacaagtgatactgagaaattattcccaggtcttctgaatgagattaagtgtttttcctatggttttagcacctacacacacacacacacacacacacacacacacacacacacacacacacacacacacacgacacacacagagagagagagagagagagagagagagagagagagagagagacagagacagagacagacagagggacagagagacatctaggctaatgagacctgaaactagaagcaaacaaaaattactaaatgacagaaatgttttagtttgttaggagttacctgaaagggggaaaaaatgcttcggaattttagtattaatgaaattaaaaaataaagctcttcaaaagattgtgttttggccgggtgttggtggcgcacacctttaatcccagcactcgggaggcagagtcaggcagatctctgtgagttcgagaccagcctggtctacaagctctagttccaggacagcctccaaaagccacagagaaaccttgtctcaaaaaaaaaaaagtgtttcattgtttagtgcaaatatttaacatttaaaaatgaaacttattttggagtaggacctgggtatgtatgccctgctgccttctaacaggctctgtcaccaagctagccttgagtctgtgctgcttctgattcagcctcctaactgttgagactacagtcatgcactaccactcttcccaaaataacacctttttttgtttgtgtttgaattcatgggggtgggggggctagggatgaatgtcagtcatcttccatgatctctttccaccttacatattgagacaggctctcattggaacctagcactcaccgattggtttcctggctagccagcttgctccacaaatcctgtatcttcctcccaagcctttggattacaggtgggtagttacaatgccatccagcatttgcgtgtgtttgcactcaggatctcaattaagttcccaaactttcttagcaagtactttttcatattgagccatcccttcagcccctgaaagattaattttttttattctacaaacctgttacgaaatttccttacttatctacagacctgatagttgaatattgagcacatgcctgttatgggcttcacttttgggataatatttacccacattggtataacccaagtgggctaaacaattgtatgtgacaatctttaacattccttacctaggtgaagtaagcatttgataagtaattgctgctgatgtgcactgaaaggcaggcaacctcacagatgttcttactgtcctacggtggggaaactgaggcttagatggtgaggtgactggctgaagtcatacccttggtaaatggcagctgagcttcaaatcagagtcctttctgttaaacatatggcctcttattaaattatacctttcagtgctgtttacttctcagatttgattttgtatccttaaagttctacttgaatgcaaggtggagcttgtgaaggaagtggtcgggatgatggcaggttggaccagactgtgtaaagttttaagggctgggtcgtaaagaaaaagaaatgtgccatgtacttcctgtaagttattccttctaattccttgcatcattacgtagtatatagtccttgtgttgaagtacatggttagtggtagaaccttgcttgaaacccagctttgtcttatttccaagctttcatatttttttcttgaaatcgcttgaacttttctgctatattaataaatgacttgaaacttagagctgggtggggggctaatatacagaatcattttggagactctttgaaactgtactgagctttgtctatattctatataacagtcctcatttgtgatacacatcagtatatgtaaattttttgtgatgtgtagatccatttaaaagctagtaaattcagagtgctaaattattttctcagtcaacacattgttataagtggattaactgttacatgaatttaaagggtttcttgtcatttaaagtattggaaaacacttttaaacttttttccccctatgttaaatctgataccagagcatttaaaattcccaaaatatccgggtattggtggcgtatgcctttaatcccagcacttgggaggcagaggtagtcggatctctgtgagttcgaggccagcttggtctacagagcaagttccaggacaggctccaaagctacagagaaaccctttcttgaaaaccaacaaacaaacaaaaaacaattctcaaaatagagatactacataacagtgaaggtatttaaagataaggtaggaataactgcaatttttaatttttgttccttcgtagagttttatctgaaaaagttttgtgtaatgataccagtttacctatatgcacagtcagtggagatagtttagattccaagatttaaaatgtttctagttctttccagtaacttacaatctttaaagcatctgaaggcgtctgtgcacacacgagcactattacctgttacactaaaaactaaatgggcctggagatggcttagcaattagtgtgcttattgcttttgcagaggagagctggtaacccagtactccaaggcagttgacaaccttctgtagctccagttccagagaatctgaccccctcatttagcctcagtgggcactgtgccacacttggagcttggatatacatgcaagcaaaaatacccatgtacacacacacacaaaaaaaacaacaaccaaaaacaaaacagtaagaccagaactaccttataaatgttttcaaatgaagtatggccccaaaatgagcttttgtagttttctgctaaataagggaaacaatgagagtgaaggtataataatacttggaagtttaagtaatttagaatttggatttaccattttgcagttttagaagtgtaagttatttatataattagatgtatgttgtagcatatgcaaatatacacatatatatgcatatatatatatatatatatatttattttggatactttgttaccttggtggagttaattctggtttggcaaatcaagaaagggagtcttgtgctgttttcagattgcagaatcttgttgctatgcaacaggcattgtcggtcagcattgggtgtagtaaattggtattctctgtcccttttcaccacacgctcactttgtaagtggtgtggggctattttgtaggtttttattttaaaatggacatttaaagatttttgttgctattcataattggttctatttaaggtttgtggcgtttctctgcatgtagaagacactaaaatgcttgagctatgagagttgatagatctgtttccaagttgtttcaggttacaacagtgtattttggttttgttgctgaaaagatagcaccaacttcccgagtgtattttttgcttgagaattcaagttaaatattttgaacatcaaaattttatgatagtacaacatgttttgaaatttacttttggaaagtaagaaaagttgcttaaaatgcttttaattacaaatgacttttaaaacaggaatcttgaacttttatacagtttcatatggaatatattgatttattttccagcaggagaaataaaaatactatgacaagtgggtgatggataacagtgataacagggttttccctatagctctggctgtcctagaactcactcagtagaccaggctggcctcgaactcacagagatctgcctgcctctgcctcccaggttctgggattaaaggcatgggccgccgccaccaccactacccatcccattattagtcttttaaaataatgcacatataacaataatataacgtttgtactctatagtacacacttttgttccagattataagaccgaggcatagagtaatataaaattagcagttggtagagccaggcttccagcaccagcagtcgggctcttgagtatgttcaactgctgtgtaacgttgccctcttttggaattactttatgctatgtctggtaagagcaatgatatgtatttttaattgctttctgtagctttttcaagtcaagttaatatttactgcactttgctatttactttgtaaatcactgacatatttagttgaattttttttttttacatagttttacaattttaggtgttttctttgaaagggtctcataatctagaccaacctaaaacactctgtagcccagactgtctttgacctcagtcctcctgtctcaactttacaggtgttacgaattctaatacaatgctgtccagcttatagccagttgtcaattggtcatctactttgtctggtattttctgaattctggctctgaattctattctagataatagagcattcggcctgggtaaaaggagaaaaacattactaaggcagtgcttaaaagatgaaaacggacttttgtagattgtgctttcctcctgctttgttttatgtggacactatatttctagttccctccccttcccggtgagacaaggttcctttgtgtagcacagtctgcccttgagcttgcagttgttatgcagcagcctcttgactgctgggattacaggcttgagccaccaggccctgcttctgtctctatacccttttccctctttgagtcccaccctgcttttatctgctagatttttctactttaaaacttgattttctggatttatacatcttcttgtgttgctcagccagatttactccgtaatttgctcttcatctctctttgcagttgcaccatattttaaaaacaactttttgtttgttttcagtcacggtttctctgtgtagccctagctgtcctggaactcagagacctgcttaaagacagctcttacattgtgatttatgtccaggtgattatgctgcatgcatttagctttgtttacttggtgtgttttccatttttaatgtttttaagaaactcagaattttattacatgaatatttcactgtaatttacctatttcccactaagtggctatttatatagtttaaagtgattttgtaaaagggataatgctcttttgaacccaaaggttttttttcctaattgtagactatgtccttaagatagaattccagaaatagtagtagatccctgaagaaatagaaacagttttaaaaggtcttgaatcatagtgccaaaatgctttctaaaagtggtgtgccagtttttgtgccagccggcaaatacacagcgtgtccacagcttcacaaccggcagctgcagagaatgtttggatgttgacctttaacagaagaacgtcccccatcaggttctgctgagcttttatcctaaattatgcttaggttctgactatggttgtggtcaggttcctgagaaggaagtcctagtttaccattctcagctctttaaagtgttcattcaggttttattatgatgcagaccttgctttgttgagacatcatctcttgaacgcacgaattgactttctggtattgaacctcaagcattttggtaagttgagtgatggggacagattggtatggtttcacatgacatttaccttgaaaagtgggtaactctggctctccctccaacatctgaaattgattcaggtgctcccgttaggatggatagaacatttacccatgaatggaagggttcaagggaaaacattcctaccaaaatttggtcatatagtgacctaagttttcactgcctttagcccagatcactttgacttaagtgatttttaaccttttttgttgttgttgttctctccttaccttatttagctggtgtcttggtcttcctcccccatactctctctccttagtgatattcggctcctagtcttcacagtttttgtgctgctgactgaagttcagaattgcttttgttttggttgacacggggtctcactccattgcgtacactgccatgaaactcataatgtagcctcagtatgtctcactgaagcagtccgtttccgcctctcaagtgttgggattacaggcatgagccaccactagcaattcagttttgccatatctttatagagcattatatgcattcatttggctactgctgtgtttttgttcttaggaagttttttgaaaaagagaagaaatagtggtgacatatcagaatgtatcatcagtaatttcattccttcccaaagtaacaatccttcagcatgtgtgatctcactgctgtgatgaaataccttagacttggtaactaacaggaacttgtcacaattaaagaggccgagaaatccaagaccaaggaactagcaggttcatggtctggtaagaatttctgggttctaatgttgtgaaagacattcatcttggtccctctagctcttttaaggaacatttgtcctgtttatgaggatgaaggcttcatggtctaatcactttgcaaaggtccaaccttttaacactagcgctttggcaatttggtaacagaatttttggaggatatgttcagcctcattggaactggaatgtcagtaagatttgttgccaggtggtggtggagtaaggctttaatcctgtcacttgggaggcagaggcaggtggatctctgagtttgaggccatcctggtcttcagagtgagttccaagacagacaggaatacacagagaaaccctatatggaaaaataaaatagtaaaaaaaatttgataccaaccaaaagataatagtttataggatgtgtgtgtgtgtgtgagagagagagagagagagagacagagagagagagacagagagacagagagagagagagagagagagatcatgtttgagcagttctagaatgaaaacagcagtcaatgttggttgaacaggagttactctagcttgtaatattgtctgggcttattttgatgatcctcctgtctcagccttccaggtgctgaaatcatactcgtgtaccaccatgctcagtttccctccacagtccatttgtgtagttgtaaattgagagccaacaatgtttcctgcagtctccagggagaaaaatctttgaagggactgatgaagcttgctcaaaccgttgtcccttctgtgggattaggacactgtggaatggggaaaggagctgctgctgagttttatttaggttggagagggaatgttggtaatttagcaaagctatctatgaagctacaggaaccaggtggtcctggttggtgttttttgttttgttctgtaacttgatacaagctagttacctgggaagaacctcatttgagaaaatgataatagattgcctgtaggcaagtctgtaatttcttgattaatgatggtgtgggtacctccccaccccccagggctagggaggggtaggtcacttctgggcaggtggtcccaagttgtgtaaaagtagacctgagcaagatagtctgcagcactcctcctttgcgtcttcttcagtctcttcctccaggttcctgctggaagtttgcgccttgaatttcctcagtgatagaatgacctgagagttataattaagtaaactaaaagaaacccttttctcttctggctgctatgttcatggaggtttttgtttttgttttctgagacagggcttctctgtgtagccctgctggcccggggctcagagatctgtctcctctgttatctcaccctccagcattggaattaaaggcatgagccaccatcatggtgttttatcacaagaatagaaaccataactaagacgaaggtgaaattctgtgatggaggaatttaagattgctattttagtgatttgttagattggccaggtgcttttgcgaaatgctgattgcaatattccttttctttgatagagtaagactgggtatgtgtcgtgtgtgcagttatttttgttgttctttagggaacaggattgtgccgtataccctaggttggcctgaagttaaacatagaccaggttggcctccacacggtgattcttctgccccagctaatgggcattcatcaccatgtctgtatcctaagatagatttatttgtttatttgtttgttattttttgaggcagggtttctttgtgtaaccctcgctgtcctggaactcactctgtagaccagactggctttgaactcccagagatccacctctggatccctgcctccagagtgctgaaattaaaggcgtgttccattgacacccagcaagaaaaattttttcttttccttttttaaaaaatttttatgtgcattggtgttttgcctgcaggtatgtccatgtgagagtgtaagaacttggagttacagttgtgagctgcatgtaggtgctgggatttgaacccaggtcctctggaagagcagtcagtgcccttaactgctgagtcatctttccagcacccaaggaaaaaaaattacttttaaatggaacatttgtaagagaatatctttcaagatctctgttcctttgtttacttatttggaattctgtataatgaatacagttttaggtatttgaagaaaactagagtttgagataagaattaatttaagaaaattcatttcctgctttttgtatttatcatatggtaagtgattatttgtgccttggtttttaaaattaaatgtttgttctttaagacaactaaggatatcataactcttggaatgaaagaccatcacctttttctaggtctggagaggtggttcagaggttaagagcacaggttggttgctcttccagaggacctgggttcaattttgagcacccacatggcacctcacaactccagtcccaggggatctaacacacatatggtgtacagatcacatgtagggagaaaagccattcacataaaataaaaggctaaaaaaatcagtttcttgcttgtgttttacttgtgtttcaagaatggattttgtgtaagaaagggataaaggacttggcagtgttccacatttatgtcattgagtacagtacttcaccatcaattgtcaggtgaaggggggcccatttaatactctcttagattaggttaggtaggcatctgcttagatttcctgctaaatagagaccatgtcagactagcctgggaagaatcaacccattgacagctcagaagtgtcagaattttggactatttcttggagaccttggtattgggtcttcatcccctgtgaggttcacatgttgaggaaataggccctcttttcattgtgtagggtaggtcatccaccctgacctcagtggagaatacattttattaaaggttttcaaagattggaaagggtcatctccactattaagttgcttgtgatttgtttattattcagacctccagaaaataagataaagctgttggtaataagtaacagtttctctgtgaaacaaacaaacaaatcgaatgggagtctgccaggtggcatggaaaaatgatagacttgtgttagagacctggttctgactgagtggttaaagtggttaaagtggttgtggtcgtggtggtattcagagactggatcctgactgacacagtgtggcgttttaggcatcctggctttcagagtcacttatttagtaggagattagctctcaactttctgtggatgctgttataatgaaggttaagtcttaagccagtactgacaaggctattggaattattgttcccttgaagtatgtgttaacactattaggttaaactgtgcaaaattactggttttgccaattgtaaattttaaatggttcagttcagtacaattaattacctcttggatttcttttttcttttaaacttacacagtcctttccctctttgttatgtgttggagtattttatctgcatttatgtctggggtaccacatgggtgtgtggtgtccacagaggccaaaagagggcatcgattccttggaactggagcttctcacagttgtgagctgccatgtgagtgctggaattgaacacagatcctctagaagagcggtcagtgctcttaatgactgagccctcctccaacatctcccctctctccctcttttgagacaaggtcttactatgtgaccctcgaggcctgaacttactggtaggtagatcaggctagccacaaactctagaggtcagccttcttctaccttccaagtggtgggattagagacatatgcccagctctgaacatttttgatgtctgtaatttcaaaaaaacacaaggaatacaaaacggactcgacagacaactctttaacatttttaaacatttattgtgtgtgtgtgtgtgtgtgtgtgtgtgtgtgtgtgtgtgtgtgtgtgtgtgtgatgcaagaatagaggccatagggcaacttgttggagttgtttctctcattccacttgtgggattcagagattgaattcatttcacccggcttggcatcaacatctcttgactcactgaaccatttatctgggattgtcaaggatttcaaacaggaatacttgaggttgaatgttctctttttcttttatattgcacctttttgttcacttagctgctttggcaataaggattcttagtcttgagattctggtaggttttatctctaattgtcatctttccttgtacaaccaccacaaagactacagaataagtggaggaaagaggttaagacagagcattcttttacaaactggtcttcaaacatttatcagacatggaataggaatatcaaaataactttgcacatggtggtggcatacattatgaagatagtttctgtgtgtgcatactgagttggatatacagtgtctttattactagccctaacaatttgagatacactgtgggagatatggcataatgtgtgttggctatctcaggagcttagggtgagtttgaggacagcattctgtcactatgagcctgaaccagtggtcctaatagtctcttttaaaagtgactcatgggggcttgagagatggctcagcagttaagaaagagcaccaactgctcttccagagggcctgggttatattcccagcaccctaatggtagctgtctgtaactccaagacctgacaccctcacacagacatacatgcaggcaaaacaccagtgcatatgaaaggaaaaaaagtgactcatgttcttcttatacttgccaggtagtaagtgtagtctagcagaatccttaggggattttagtttttataggcatttatttaaatttatttaaatttatttatttaaatttatttatttatttaaaaggaagttaagagaaaatttatggcacagaagtaatacttttcattgttttatgttctacaagttgagtttttagagaagccactgagcgttccttagtatgtagtacttaagaaatactgtggcatgaatggagagtctatactaaaatcagtgaaatacttgttagtgaatgatgaagtagaagagacggaggaaaagagaggtgattattctcatttctgggctgtattctcttggaaagagagatgaggagagaggaatcccaaattggcaagtgggtgattaaaagaaatccctgtagctgattttccctccctccctccctccctccctccctcccttccttcctccctccctccttcgtgagatggtcaggtcattcatacaaagagttgctgttgggaaattatttgattttaggacctaggtccatggttcacttctttttttatccccagttgttggaagagttgattgctagtgaggctgattgctttcccctcagttgtcattccccccaggggcgagtttggatgagaagaggctgctttggcaagggcaacagctgttgaacagtctgtttggggattaggtgcaagttggtgtgtggttgaaacctgcctcctggctgctgaaattatgctttttgccttaaggataaaggctttgctgctcactctggttacattcacttagctctggctggtaatgcttctaactgatgcttctctttaaagagttgttggcagttgttgtgagcaattggaaatgttacctgtgctttttcttaagtttttcttagaattgaacaattaatggtaacaatgtttgaatttaaaattaatattttttggtaatggtagaaatataagccttctgactgtcttgatgaaagtgtcaagtaaaacttacccaatatgtgtataggaatgcaaattctaacaacctttagtagcttctagccttagctggatgattgctcagcatcctcagttggagttgcatacctgaaccatatatgtgaccagtcgtggtgatactatgttgagtttagagaagagactaaatcagttgcagcgtattatcaacttggcactgggtggctaaaagcctttggttgtctaagagaataccatttgaatgctctatatcaggacttggagtagatgcttttaatgtgggtgggtgtatgctggattctgagtatcagataatatattcagatcctgagccagggtcatacaataagcccaaacatttttagacttggcctttgtggtcttttgtggtgtctaggtgctacattgtcagccctaaagagtgaatcatgtataagaaggtttgggcatacagttgcctgtgttggtttagtttgagtgtcatttttagtacaatcaactcagttttaaaggtgatgctacagtaatcagtgaacttgtaaggtgctagactatagctgaactcagttgtctggcataaactgggaatctccaaacgtaaatttataggtgggctcagttttccaataactagaaatttactcactgtagatttggattgcacatttggaagctagcccctcccaagatatttaggttaactttgaagttctggttgatagtttttgatttttaagttaactagcttatcttttcagaaacagaatatttttttctcaactttttcttttggtgctatagcttaaactcagggtcttgagcatactaagcaaatgctccaccactgaactacattatcagtccctctcttcaatttttatatgcggtgtaatacatagctataaaaacagattaaatgtcctgaacctgaaaagcttgggatcggagggtttcatgttttagaagtttttataatttggagtatgaaattcttcaaacttgcaaacttttgccaggcgttggtggtgcacgcctttaatcccagcactcgggaggcagaggcaggcggatctctgtgaattcgaggccagcctggtctccagagcgagtgccagaataggctctgaagctacacagagaaaacttgtctcaaaaaacaaaacaaaaacaaaaattgcaaacttttgaatatcacacacacacacacacacacacacacacacacacacacacacacacacaattaggagtaaatggagttagactgcttttctaatgtattatgcttgatttatctgtaaaagtaaattatttacttaagaaaatctcaactttaatatattcctatgagttttgaagtaattttttgtgcagtaattgtaactatttaaaatttttatgcttagggtttttgtatgtgcttggggagcctataggatggtgagatgaggtagcattagtgttgggcttagtattttatgatgttaaatatttgaaacaagtcattttaaatttcggaaaatagtcattgtgatattgcaatataataggaactcagtttttggtttctgttcttactgcctgacatacagttcttaaaactcttggattgttgaaatgttcagtgtatttttgcaaaagacacggagctgtgggagttactttatagaggaatccatttctaagctgaaaacagtttcaatccgacttcacccttctgtgaggaggggttgaaggttaagttgattggggatggccagtgatttgattggtcattttgacatagtgaagcctccattaaaaacccagacggcccagattagaagggattgcctggagagctgtgaaaaagagcacaagtgcccagagggtgaaatgcctcacctctgtgaaactttcccactcaggacccttccagacctaactctatggacttctttatttttgtgttcactgtgccctttaaaacacaaatgggtgtaagcataagtgttttctgagctctttgagtcacacctaacaaatcaaaacccaggaggggatggttctaatctacaagagttgtgatcctcatctgaggggcgcgtagggcacctagttggggtcttttggagaatctaatgtcagaagtggagcactctcccagggtgctgggcattgaacttagggcctcacacatgctaagtgggtgctcttctttccagaagggttgtcatgagtgctgtggaagagtgggccaagctgtttctcctgtctaagataatgctatgagttatgtgttactactctccttcactgggaaggaaggagtgtcatcaggttttgctcctgtgaggactgagaacaagtcctgtggcttgctcttagggactctgtgtgccaatccacctagttacatatttaaaaacaggatgaaaaaaaaaaagccaagcatgtgcttacaaactgaatgcttactgacaacacgcttattgacagactgaaaaacagaaggatttattagttaacttcacaagtgttactacggataagcactattgtgtggcctgggaatgtggaggtaaacaatggagctttttctgttcttccatatttttggtttgtctgtaatttacatcattcgttgtgtgaattactttctcggaggaacatttgtattggttgcagttttgtgtactataaatgctgttaacattctaatgtttgtttatttttcttgaacatttgcgtgcagaccaagtacagtggtgaagccatttgatatgtgttctgggaaccaagtgtaggttctctgtaagaccatttaacactcttcattgctgagccatctctccagcccagcagggttatttcttactgttgtgttctgttttgtttgcactgcctggtctggtatgagataagtagcttaggttagccttcagcctacggcagttctcttccccaccctcctcagtgctagctcataggtgcacatataacaaaaggctgttttttcctaattcacttgagtacgtagagtggcttagtggaagcagcgtggacgttgtactcacatatgtagttttaacatttcactaattgcactttgcagatcttgacttccatttgtgtaaactggagttgtagtacatcatactttataaaaagtcagcaattgaaccaaatattcccttcttagtgcgcctttttctaaagtgtgttatgtttccttttattctcaattaatatcactgtccatggaggtatatctcattttaaattctgatatcccttcccaccaagagtggttgaccgtctggtggttgtataagatttaacctaaaaaaagtgcttacccagtcccttgttggaattttctatcatcataaggagttctgttgagcagcttaaattctgcatagtccactttaagtgaaacctacaattgtagcctgctgggtcccagaatgtctgcatttcaaaggctcttgatgcttatgtaccaacagctctgcagaaagcttgtcttctttgtttcagcgagatgaggttgctgttttcctcccacagtagaaaggatatcttgttttaacttgcattctttgctcaccagtgagcttcagtgtttgtcataatcattacccctccctaaaatcttttgtgaattgtccagttttgttttcagagctgggattgaaaccaaggaattgactttgttagtgtgctttgtttggaaattgaaaattcagttgtattttctacctgttaaactaatgggaatgagggtattttttgtggattgttaaggttgaaaccattgttaaagaccaaaggcacttggcgagattcttagccccagatgctcacatttaattctcctgtaagtttagtactttaacccagacaagcattgtaacctatgcttcagtttcttcatctgcaagtaagagtaacaattacttcatttgactgactgttgctggaattaaaggaaacagtggttgcaaagttactatagctcagtactaaatactcattgaaggttaactgtctgtgctaagtcattaatggtgggagtagaactcttgactcttttgtaccctgtttcttgccattcatgatcttttcattggaaacttcatcgtgctatagaacttagtagttatttcaagacaaggcacttatttctagctaattgtgattagtctccaaatgatttcttgaatacatctatttacttgcttttgattttctgattgtgtttaaaatagtgcaggcttttaatgccttgtatttaagaggggcctctcctgtaaatcagctttggtcttcagtagagattagtagcagcagctgcgtttgctttatacttgtttgtggcattcagtcgtgtgtctccccccccccccccgtgtctttattttggctgatactatagcatgggacaaactaccagggggctcacacctatagaaaactgtttctttccactagtagccatgacttcctactatagcttctcaaccaggagtgggaccttgtgaacctttttctccccatgcttggtggagtattgaactagattgattttattgttagacccccggaaaactcaggtatggggtcccaggccacgactgcgatcaccccaatcaccaggtggattcgagagcttgctgcaaactgcacgaggctttattgttttttaacgatctaaccccatgttagctcgagtctttcacccacccgccatggcagatggctagcaaagacaactcctaggggctgccaagagatcttgtaggaaagacagctcctaggggctaccgagagatcgtgtaggacagtgaaaggggagtgtctaggggtacgcacaggctcaggattggtgtggctccaggcttggagggcttgccctgtgttgattggtcaactggttgttatggcccataggccctcccagggtggttgctatgctctgtgcgtcattgctgtgcacttgtccgtaaagcacacccagggtcgtaaagcatagcgccaccagctaacttctgattggttccttgtcaggaggcaggcgtctgacctctaagtgaccaaggcaaggttatggcaagcacgtgttactgttgtggctgccgaaatggggagctggtcccttcattatgcaggttttgtataggtaaaccacagccgttgaaagctattgagatatttcttagctaggaactaaaagaattacctattttgccatagaatttaaaagaaagatagtttgagttcgctctgttttaaaattagattataatatctttcctgcttcactgacatagtttatagcctttgtgatacagtgcaactgagtgtctgaatgaacaggatcaccagctttatgtctgttttaaactttactctggaatatgtttcaagtactaggttatggtattcaagccccctcaccacacccctcttgagatatgcatttaagagattaacaagtaacttgattcctcttattttcctgttgtgtagatttctctcaagccctgtgaggaatctagctctgtagctgacataatccctattgtgtgtaaaatgtttaaccctttacaacccttacttaaaatctgattaatgatgagcaatgtatgttcatagccattttgtaatctttcctcttggggcttaaacaacctaaattgaggctattttaaaatcttagctgtttactaattgaaaatgtgtgtgtgtatgggggggggagatttagctgaataagaggcttttttcagttctttattttataatatgttccactggtttagatcaacatttatacaaggtatatttgttgatgcaagtcagtcagatggctcgttaagtgtctaccatagtttcctaccttcttaattactttttgtactgtcttcattttacagctttatctttgcttgatcattattgctcagaaagtcattggcttttccacttaaagaaaaaaaaaaaaaaccaaaaaacaaaaatcaccatagcacatccttgtaatctctgcatctgtggaggtttaggcaagagggttgccgtaagcttgaggtctgcctgggcttcatagtgagacctggtctcagaaagcaaacaaaggaaacaaaatcacagcaagaaagagtgtggacttaatgccttcaatagtactgtggtgttttgattagaatggcccctgtaggtttatatatttgaatatgtagtcaccagagagtggtactatttgaaaggattagaaggattaggagttgtggtcttgttggagtagatgtggccttgttggaataagtgtgtcactggggggagggggtgagctttgagatttcaaaaacccactccaggcccaggttctctgtgtctgagtatggatcagtgtctgcctgcatgctatcgtgctccccaccatggtaatggatggactaaacctctgaaactgtaagcaaaactccagttaagtaattgctttcataagagttgcttggtcatgttatctcttcacagcaacagaacagtgactgagaaaaaaaaaattttaaataaaaatgtcaaggaattctggtttttaatatgccactaagtttgctttaagtttctgagtttagtagacaaggttattgttactttattcataatgtgtagtgcccattagagtactcagaaatagttttatattatatagttgaataagatggatcctttgaaaacagctatgtggagaaatatattggagaatgttttcactttggtttttattttaagcggttttactgtgtagcccaggactaacctcagattcctaattctcctgccttagcctttctagctctgggattacaagggcacaataccatgcttggaacatttaaaaaatttactgcatttctgctgcctcttaatctttaggatcctgagtgaacagggtttttattttgattattgaaaccaatagctctatgtgtgttaaatttgcaaaattttatatagagtagttttagttttaaatatttgaatggtgattgacataatttaaaaattttacatttagcaaatgatgctttattcattcatgggggtgcggcatgcatgccatggttcatatgtatagaggtcagaagacaactttttagagtcttttttgtttttttacattactgggttcttgaaatagaaatcatactaccgagctttcatagcaagtgcttttacttgctaaaccactgagccatctcactggcccactagtgtttttttgtgtagttttcagtattcctgagtgatgttccttaagtgttaactttgaacgtaaacatgactcgaggtagccagaacatagtttcttggtttttctagaccagtttccactgtgtaggcctggctgtgctgaaactcactctgtggaccaggctggccttgaactcggagagatctgcctgcctctgcctcctgagttttgggattaaggcgtgcgccaccacatgtgggctccagaatatacctttaatgaacacttctctgtacatttgaggccatggtagaataaacaaacctagctatttctttacatttcacactgaagtcaatactcatgataaatttaaaggtgaacagaactgggagaaagggaaaagccaggtatatttgcagatacacacgtacacatgcacacgcacacacacagctttgatttaaatttcaaatgttactgtatgttttataggaactgaaaattaccatatctcaacccatttcagggtttaagaaaatagttcactcttgtaaagttgtaccttgaaatatagcaaagaactatgtgtgtattttttttttaatgttagaagttttaagaacttgtatatacaattctaaatgttggattaattgcttatttcaacttaggaaaataacactttaagtgagactcttatattttggacggccaagaaaatttcttttttagatttattttatgtgtgccattgttttgcgtgaatgtatactgtacgcaccctttgtgtgtctgaggtccaaagaagtcagaagagggcattggatcctctgtaactatagtaatggatgcttatgagtcctttgcaagagcagtaagtgctcctaactgctgagtcatctctctagccccactaatgtattttttaaaaaactgtttagctgtgtgacagtttgtgcatgtacatgtatgtacatgtgtgtatggggactggaggtcaacctctgctatcttatgttacgccgaccccccccttttttttttttttaaggcaggatgtttttgtttttaattgaacccagaacttaccagtttgctagattggctgtccagcaagtgcattcattagtctttgtttctaccctgcagggcagtgccacaattctgctgtttccagcttctgtgagttctggggatggaattcgggttttcaggcttgtgcagcaagcactcttatcaattgagtcatctttccacccctaactcacctccctttaaactattggtattggtgtccttttctccaccaggttttcatttctgtttgtcttactctaggcttggctgccctagacacctgctaagtaagaaaaaagtttccccgtggagttaggtttggggtttttgttgttctgttctctttcttttaatccactctaactctatactattgtaattttggtatttttatctggattataaaattatcttcataaatctttctgaagttttatgttttctaagaagcagcttttgtttttcattaaccctttcacttgttctttggtctacatttctgttcttcattatttctttcctttttgtttctttgtctttcctttgtttcatttttattttatttttttaaatttttgctttaaccgttcctattttgtgattctttgtttttattgagatgagggtactctatgtagctctggaggtcctggagttcgctacgtagactgtccttgaactcacagagatctccctgcctgcctctgcttccccaagtgttgggttaaaggcatgcgctgcttcacctggctattttgtgattcataaagctgtgtgatgtttcttaacacagattactaaatgtttcttaatttttattagttttccttttaaactaagagtagtataattctaagggtttcgtaactacattttcttgtttacaaattttggaattaaaatttgctctatcatatttcccatatcaaaatataatctgtaagggaccctaaggaatttatgaggtttaacatgtggtttgataacacagatcttttgggtgggtatgctagaaatgtgttctaaacttttatctgtgtgtgcatgtgtctgtctcctcctttgcttgtttttttcttcgagacagaacctcactatgtatacctggctagtttggaactcagagagatcctcctactgagttctgagattaaaagtgttgttcatattctctctttctctctccttttttaatttggaggaggaggtgagacagtttttcattctgcatccctagctgtccttgaaattaccatgtagcttaggctagcttcaaactcagggtagtcctcctgcctcagtcttccaagtgttggaatttcaggtatgagcctccttgcctggctagatctctatatttttgagtcttcaatattattggtcaggacatgatacttttgcttgatctatcaattttgagcagattatattaaaggtgattgtattttcttttgacaattgtgttagtcatatatgtgtatatatatggttagggataaattatatatatttatatatatatatatatgctctttttagagtgactgtatttgtgatgagtagattatattttcatttttatcagtgtgtggtgtctttgttatagtcttaatttatttttgaaacattgtacatcgttaggaatattgtaagattgcagagaaattgatatcaattcttcacagtcatacattcatcattactcacccccacttttttttctgtgctcaagttctcttgcactcaggctggtctcggactctgtgtagctgaggatgaccttgaacttgtgattttgctgccttcatctcctgtgcattgagattataggtgtgtgctaccatgctcaggtgattgaacccagtgctaggcaaacgctaccagctgaactgtatatgtctccctgctttagaaagcaaacatgctgattttctctgtgtgcattgcaacacgaaaaattagacccatgtataacacctttaagtgtaaacaacatagatcctcttctacatacccacatgataggtaccttactttggaaattctataaatattcataattttttgtttttggtgcataatttgagtattgtttgaatataggtaaactggggggggggcatgttttgcagccagtcatacatttacatacataccttgtaagtttcagggacctttttttttttttaaagaaatcaggagtttaaagaccagaaagggccaaactcaacatgagcccgattgctgagcaagtgccaggtccagttgatagaagagtcagtatgtgagtttgcccagcagactaatcttagcctgcacttgggtgggtggggtatctggacattgggcttttgtgaggcataaattgtgtttatcatagctgtctatctcaggagcattgagctctcaaggacagagtgttaaaggatatgagctttttcagctttagtggctaatgaggtcagccaagcaaagacaaatgagcttcaggggagtccttttcaacaacagaagttgtgggagggcataaaattcagtcaagatagtcaggggctcttatttctaaactttatacaaaaagtaacctctgcagtagtaagaaagaagaaagactttttcaactggggcaaagctcagtagtcaagtgggatgttagcatgcatgcaaggacagggccttaggtccagtccccataaccaggataaaaccaaacaaaacccttaccgttaaagggacacttctgaataaaaatacagcctataaacatttttactttttatgaattggattactcatcattttgagtgttgccttctgctaaatgactctgttaacatgaattgagttgactgtattttgttcagtcatatttttgaatgttagatgaaactcatttaatgttttaaactatatttttaggcatactataaagattacacagctgttgcttagagatgcatgtgaattgcttggagcatttggattatgatttggatactttgccagctgatagttgctacaaatgagaagaagccagcatgagaataaaattcttaaagggcatgaacatgatacttcaacacattctgggtagtgcctgccttgttttaggcattatactgtaatggccaagtgcagttaggagaatggctttaggttgtttgttagaacgttgggagtgtgttcccctccttttgttaggaatcagaataagtgtgaccagctactcatgtcaagatacatttcattaattcaactcaatttccacacttcatttgataaaacttttatcactcagttgaaatatttagtttgattctttgtggcatgcctaattgtgcatagattgagttgctcccaagcagcaagtgagtctctgaggctacatggtgaattttctatcccctcccccgtgtcagtttcatatgcctgttacatacatggattgatggattgactttatttacttttatgtgttttgcctgcacatatgtatctgtaccatatgtgtgcctgcctggtgcctgcagggggcagaaaaagacattgaatcccctggaaatggagttttaggcagctgtaagccaccatgtgggtgctgggaactgaacccaggtcttctgggttattcttagctcttaactgctgagtcatctctccagcccctagataggtagttttaaagcctcattgactatgcttttagtagagcactctgtattctgtgcctatggcaaaggttctgtataaatagagtttgccacagacatttaattataaaattgcttatttttgttccaattattttgtgctgctataatagaatacttgatgttgggtaatttacaaagaacagctttgtttcttgtagttctgaaggctgagaagacaaggatcaagtgacccacatttatttagtgaaggccttgctgtgtcatcttctagcaaaagagcaaaggtgttagagaggggatttcccctatccccattctttgtgtagttttagctatcttggaactacctctgtagaccaggctggcctcaaactcaaaagagatctatctgactcttgcctcccaagtgctataattaaaaggagtggatttctttatcatggacctactacagttgcaacttaatatactcttaaaataatggtgtaaatctgttcatgagggcagtgcttttatgactcttcaaggctctacctctaacagttccgtttgggattaagtggacttcggggagcactgtaaaactagcaatttctttggaagatagtcctaattgtgaaagactttaaaagactaaaatagtggtcatctgtttttcttgttgggccttatgatccatttgcttgcttgatatccagcaagtgtctgaatatgctttaggtgttaattgtgtagatggaggtgatgtacttctgcactaagtattctgtgtctaggatatgattatagtgagactaatgctgtgatagtcttcctggcacttatttgaggacaggctaggaagaactggaaggcacaatggaacagtatagtcaggaaaacagtgaagtgagatgctattaggagaagtaaacactgatttagagattagcaagctgggaggagaggagaggagaggcttgttacccagtgtataaggtagaatttagtatggttttttaaaggttggttgatttagttttatattgtgtgtgcctggtaccttgggaagccagaagagggttttgaattccttgaaactgaaattacagatggttgtgagccaccatatgaatgctaggaaccaagctcaagtcctttaagccacaggtgctcttaactgctaagccatctccagctcccataggttgttttaatggtatttcattcaaatcccagaaacagcttttgtgctctgcttgaagatagtctcactttcactacgaataaagagtacttacacatgtttgtcacttcacaactaaaattttaagagcagtttgctcttaaactttgaacctagcaatataccaaagaatcagtgtaactggcttttacaggaaaaagacttttgggtaggcagtacatgtctataactctcaagagactggagcaggtggatggctgtgagtttgagaccagcctggggtacatagtgagttttgggctggcttgagctacagtgtgaaactgatgtgtatgtgtgtgtgtgtttctagctttaatactgtatacgcttttttactgtatacgctctgacttcagcttcccctaagatagaccaaaaggagagcttttgtaatttatgacataaatatacagggtagtatatttttgaagcacatcagtttgatcacttccactagattccagcaggcagtctcttgaaagcaacccctcttaataaaccccttcgtagacatcaccagaaaagcccagtagtaaggcctttttaaaagttaactaggaaaaatgtactaatgaacattttatcctattgaatgttttataggagcacagggcatgaaactgtcaaacctcaggaatgtcgtacagtttatatttgtctgaaaattttagactatacctagtgattgtcttcaattatactgcactgtcattacttccaaatgctgccagcatgtgtacagaacatcataggctggtgattgctaagtcatgcttcatttcttttttctgttgtcagggacagaaccatgagtaatggattagcattctatacttttctactacccagcagtccccttaggactaaagcttcctctagtcatacttgtaagttctttgtgatgcttttgtgtttgcatactagggtacttgtataatggggtaaattacagaataatgagatcttaatgtgaatgagtaacttctaagaagctgtttgtgatcagcttcccagggcttacttgatgtatgtggatagaaagaaggtctactatgtgctgtctcatttttctaatcttcaaataatcttttctggaatttatgttgtgtggtaaccatcatagctaatctagttcttagaactaaaatatgttgaacctcatttgaaagggccaagttcctcctcctaatggagaaactgtatatggaaaaaggtgagaagcatgttttcccagctgtagtagataattgcttttcaggacagaattgcccaatttataaagtagttctgagcagaagctggcagctggtaaatgtaaagatacttgccagactataaatatctggtctggaatcatcagtgtccaagaaatactcttggaaaattaagagtttccttggaataataggaaaaccaggctttcttccagtagttgtacttaaaaatgggaaatttgagttttgatttagttggactaagtattccatgctactaaatattatgtatacttgtaccttattcacattaatgactaacagaaggcagttttgaagacttcatggtcaatcttttttcaaaaacaacaaacaaaaaccagaatcttgcgctatatatatgtagttgggctatatatatgtatgtagtatatgtatgtatatgtatgtagtatatgtatgtatatgtatgtgtatgtatgtagttcgctatatatgtgtagttgggctggccacaaactcatgcttctttctcgccaggatgacatgcaattcccactacacctggctccataatctctatgaagttataatcattgaaaccagaagttagaattgcattctagtgttatggagatgtgctaagcaacagccatttatagtttgctgggaaatttcaaggccatcatgaattcccagatttagaagtaatcactgtagcttataatagccttcacataagatagattctgaagggtgggtagaaataaagaaagcctgctggtcttcgggagagtaggagttgagtttggcggattctgtcagagttatgtaggctcattctccacacgccagagtggaagaggactgtggtaattgaaaggctgccgtggatcttgaaggttatttggcagctgagcaaatgttaagagtgtactccagttggcagtgtgcatactgtggttttaaaacgctttattagttagtatctcaatttgccagaatgctgcttctactaataatggtcactgtgcacaagtgtgagtgtccagcgcatgacaggtacttgaagggctctctgtacatagtttcgttctcacagtagctgcacgcggtacttgagaaatcagcaaactgaagcttttaaaggcttttataaatcatttaatacaaccagaaaatgagagttggcattgaaattcccttagacctacgttcatattctttgcccaccaacaaagtacatttactattttctttaatgttttggattgagatgagcaactgaagtgaatatcatgatcagccctctgctgaaggtttttgctgtgaacattctatgtaaaaatctactgaaaacaaaattaacctttagatttaaaaacccagagtggtacccatgtctgtgtgctcattacttgggaatctgaaacagcaggattgtgagtcagtacataagaagcaaacacacaactcagctttaaatttcaatggcatggaaagcaattgttttatttctaaattttcttttcttaattacaaaatccatgcattaattggagaaaacgctgggattgtagatcccaattcttccttccccagacagagaattaaagccattcgttattctggcttctacagataccactaaaaatgagttagtattggtaatgtatacacagatatttccatgtatcgtttatatgtgtttatatatatttatgaatagggtcattttttctggttttggtttttttttaagtttttttaagttttttttaaagttttatttagctgaggctggcctcaaattcactgtagctgaacatgatcttaatctcctggtgcttctacttaagtgctaggattacagacatgagccactgtactccactaacgtacattactttataacctgattttataatttctgtgggctctgttttatttcaccatataataaatctatctttttgtcaatctgctgttatcttacatttgtgtctgaatcttgtcactgttgtgaacaatgcttacaatattgcatatttaggttataactgaatctccaaacattatagccattattcaaaagttatatagctaaacagtaatattgattagcacttatttgcatcagataagttccagtgttggttaataagccatatagcaactccatgtaaggaaattttcatttcgtttcatgcgtgtctacactttgtgcatacagtgctcctggaggccagaagaaggtattaggtcccctggaactggagtttagatgactgcactgcagtgtgtgggaaatcaaaaacattaaagagcaagtactcttaagtactgaccatttctcttgtcctgtaagtccactaatgttattatgaatgcataatagcaaaagcattgcttctttatgtaaatggagttcttaattggtctaaacaggcaatatctggagtcagatatagaggaaaatgctgagagatcagagaaggaggaggagcaagtcaaagccacctttatctcattagctatctcattagcttctcagaggaaaagagagcgagttcctgtttcttcctgcttatgtgctctttctacccagccatctcacttccctgtctatctgtacagacctccagaattctatagttagctagtggcaactatagaactatctgatcttcagacagactttatttctacaagcaaaatctcaccacacctttatctcatttactctcagtgactttattgtctctactttaaaggtaaaagaagcctaggaggcaaatgatgcagactctgttcctgttgtatctttgcagccaaaggttgctcatgccagccttggtgtaaactaaaattccagagatctagcgtcctgagaagcagctgtcagtcagtgagagacagaagttagtgggcaagtacacccagtttcctcctctccccaccaggatgcctgactcggctccatacttgcacagcattctaagctaactgatcatttactcattggcagcacttttttgttggcttcccccatttgcctgagtctcctgctactgaatcccttccaaataaatttaccaccagcactcaaatccatatgtcagcatttcttctcagtcttcccagtgctgcaaccctcatgttgtggggacctccccccccaacaatcataaaattacttttgttgctcctttggggaagcagaggaaggaggggcagacagatctctgtgagttcaagaccagcctgatctacagaatgagttccaggactatacagagaagccctgtcttgaaaaatcaaaaaaaccaaaacaaaacaaaaacaaaaacaaacaaaactgcaaatgtgtatttgaacaagaactgtgagatatatttagactgcattcagaagtgttctgtggttataatttattttgaaattttagcatatagaattgagttagccctacttcatagagcaggaactactttttcatttgttagtgtgtatccctttatttttatttaaagcatttttttttcctccagcatccttcctcctcccctgctcctcctcctttctatgtcctgtctgatatctccctaaagtttctctgggcagttgtacccaggagtgggccggaatgactcatcagttacatggaatgcctacacaggtctacctattgagtatagttcattgcctcacatcctcggcaacctttaatcttcttgatttgtttgcttaagtcatagtttttagggcatcttacagtcttttataattgaaactttgttcttattttattactaaacagttactcaagttccttggaaaaggttctatactctacacctaagctttggtgcttctaaacatacacaccttcaatcatagaactgagtgttaatggtaaaaatctcaaatcttgttgaattgtgggggagggagactacaaccttgtagtctgtgtattaatgattctctgggtgagtatgtatgtatgtatgtatgtatgtatgtatgtatgtatgtctaccagcaattatagttgtcttagggttttcattgctgtgaaaagacaccctgaccatagcaactcttataaatgaaaacatttaattgaggtggctcacttacagtttcagaaattcagtccgttatcatgatggggagcatggtggcatgcaggcagacgtggtgctggagaggtagatgggagtcctacatctaatgtttcaaaattagttgtgtacaaatacacagtaagtagctgtctgtgtggcttttgagcacaggagaaaaatgtagactggaaatagtgtttgacacagtgattagttgaaaccgtgactatggactgcttttaagccttaaaggtgtctttgggctttggtaggaagcatttaatcagcacactaccttccccatcaattaaaatttaaccattactattgtgtttgtgtgtgaacaggtgggcccacatgcacaacatgcttgtgatggttaatggacaactttctggagttggatcttttcctttaatacaggttctaggcatcagactctattctccaggctcacatgacaagtaccttcacccactgagcctcaatttcagattcttacgtgagtgaatttaagaaataaaacatgttagtccttggtctttcgtttcatgagaatgaagataatacaatttgttactttatattagaactgttgtagtttcatttctgctttgacagataatcctgaccaaaagcaacacagaagacaaagggtttatttggcttctaattcccagtttcagcccattatataggggaagtcaaggcaggaactcaggcagctcagcagtcagcataaacatccaggctgcctgctcactcctaagttttctcaactcacacagtttaggcccagcccatgcaatggcactgtccatattgaggaagggccttctcacatcagtcaacagtcaagacccccccacccctgacatacagcctcatctaggcacttcctaaaaattgagattcttcccacatgattgtaggttgtgtcaagttgacattcagagctgtcactgtaactatgaagtcttgagtagtaaatttctttctcttcagcattttatcatgaaaattttcaatgtgtagcacagttgaaaggatcatccagtgacatgatatactgtagtggatacaagcatgttgttggttgtttttttcactctttccttttttgcctttttaggggggccaacatccagcatccacataaatcacacatggaggattctaaattacaaatgcctggccttagcttggcttgtttcttgccagcttttcttaacttaaattatcctctctaccttttgcctctggggtttttccttttactacttatgtaaatcttactctcactctttctgctagctggctgtatagctgggtgactagcctctgatgtccttttctccttcttctattttgctcctccctgttgccagccctgcctgtcctttctcctgccttgctattggctgttcagctccgtattagaccttcaagtgttttagacaggcaaaatatcacagctttagagttaaaatcggcacatctttacatcattaaacaaatgttccagagcataaacaaatgtaacacatcttaaaataatattctgcaacatttcctctttttttccaaataaaaagaaaggctttaactttaacatagtaaaactatatacaacaaaaccagttctcaaataagaattaatgtacaatattctgtccatttgtagttagtgtattcagagaaaatagtgcattatctatactatcttagtgaatccaaagttttacacctaaattgctttctatcataactaaggaaaactgcaactcaaaaggccctcagaaagatacactactacctgagtaaacaggaaggacattgcaagcaacttggaaaactctagaaatgacaagacatctgagtgcctcgacagtcaccaacgttcccctgcaactctggggcatccatcttcagcctgcaggcctgcagtatctgatactcttgtgtagcaggatttttggcaaatgtctatagcagtctttttcctatgtgtactgcatgtccattctgcacagcacaatggctaatcttgccacaacgaaagcaaactccagtaaagtttcttgatgcccatcatccttttatgaagtaaattggtgctgccaggagcatacaagtctcattgtcatgaaaagccctatgttaacaaaacactttaagtgccatattctgtaggtctttgaagtgtttgaaaatcacctatctaaaatatacctatttaaccttaaaaacatacctagaagcctcccacaatccaactcttgggagtgtgggcgttgttttctctagactgtgttttgttgtctgtggatgaagtatctgtaggggtccctgaggaaacgtgagataatggtcaagtcctgggaagaccagtggtcacttctgttgatagatatcacctgtcaagtttcaggaggtccccctgatgaaatcaaatccatatcaacctggaacgaatccagagcctcttgtttcctgtggaagcatttttgatttccatttataaaatacattttgactttttaaatttaaggcagccctaaagtaacgaggttggttcagttttgcagtcccgttcacaatcccacatctcccagcagctgctgtttcttaccagtattcaaaaaaattcaaaatcaacacagtagcatacaggatctagactccctgtgtatttccaacttacactgcttctttctcttatatcacttttactctctttaaagactattttattatttttaaactttctttctatgactgcccataccccttccccctgttttttttttttttttccttaagccccccacgcattgtgaaacacttaacacttttcgaggttttttttttttttaatgtctggactttttttttttttcattttgtcatattttttatttctttcaagaaatcatttctagttaatgtctggacattttttgctgtgcatcttttaagctttttgtctgccttgcaaactttagactgttaagctatacctggatcctccacatggctatgttggctggctccgcccccttctcaggtcaggaaagccaatcctagagctcaaagccctgtgagaggttcatgactaagagctgcattaaacctttctagctatggaatcctgtacctgcattgccacaagccactttttacttagcttgctgtttcttagcgctgctggctgaacagcagtgtctcttaaaggagacactttccctttctttttcccagtttgcttaggccctctgtggaaatttgggcccacattgttatgccaaaataatgttattttattttttttttaactcttttggcactttcctcttttggaggcccttcttcctcttcccagatttctcctgctatttattttttgtgcctaccagccccacctatcctttctcctgcctcactgttcaacagttagctctttattagaccaggcaaagaatcacagcttcacagagttaaaccaatgtagcataaacaaaagtcacacaccttaaaataatattctacaatacaaatgttttattgcatttgggaaatggtaacataccagttttaacaaatatttaaaattttgcaaacaaaacaaacatcacacaccaaaactcatcagatgttaggtctgtacatctcctttctatgtactaagtatgagggaagaatagtgtttaagggatttttcatcctgaaaggtggcccaacagagttaccaaaatattttcaaaaacgcactactttgctttagatgagctggcactttttcttgactgtgaatcagtagctaacacccagttgcatttgcattttgtgtatgaacttggataccatgggataaatagctcagtagtgatgttgatattttacctcttaaaaattaataatactgcttttgtgaaagtgatgaatgatacatcttatgtttctacatatttgaaatgtctacatcccagatggttttcttgctttgaaaaaaaaaaaattgtttgcttcctttatttgtatctgctgtttgtcagtggtattcacaatgttcttgctattttcttcagtgaaccatgagagaagaacctgttactagtcagcagactttcccccatctttagcaagttttttttaatggaatagcaaaggagaaatgctatttaatatttcattaatttctgtcataagacaagccttcttgtgtaatcaactgattcgtatatggttaatggaaataaaccttggtatctttaaaatattatttatcctcaagtttacttgtttattattgttgtaattattattatttgccttgatcagaaatttactttcttaaagttctagagacagaagtccatggtcagggtgaggataggattggtgtcctctgaggcttccgctcatgtgcttgtgctagctgtccttctacggcctcttaatatgccctttgtacgtgtggtgcttctcgtcatttaaaaatgcattggcaggcagaagctatcagagtcagttctccagaaatgaagagccaggcagagtggcatgtggttttaatcgtatcactggggggcagaagctgcctgagactgctgggtgtctgtgagcaaggactgagtttgaggtcagtatggtctatataatgaggtccagacaaccagtgaccctgtcttgggaacacccctcctcccaaaacatcgaaggatcccatgttcatgttgaattttgaatctgttagaagaggctctggggttgggatcctaacagtcattttttttgtctgaaggtgagtcatcaaaaggttacgtgtctgactgctgacccccagctaagttgtggctttgaccctgaaattcccatgattggctagcaggtgatttctattacagagagccgtggtaaaggcttccttatttgaaaagccagaggttcggctctcagctgtcctaccacgtaccgtacctgcagttaattttaaagctacagttcatgacagtgacttttcactcactgcaaagtcccaaaggtcactccacttccacagtacaaaccaaccgtgggtttggaaacctgtgaacttgaagggaaaagtgacttgaggaaagaggagcaaagcccagtcaatgagaagaactttggttggtggtactccaggaggaaggccaggggccacaaacggaacttttagcccctcttctgcattttttttccccaggagtctaagtcgtcagtgtcttgggaggggaggggctgtaaaaaaatcgacaaaaatttcatctcgtatctaattgacttttatgtatatgctcaccagtgagcttcttggcagtgggagttaaaaatgggctttgggttttgtaaggtgggaacaaataacagtaatagggggacaggggctcagtgacatcagtcagctttcttgtgagtgttacaccggagggaacttgggatttatagattaccctgactctatcgtacttccttttctgggggtgtgggggcagagaaacaactgctctgtttgaggatctgtctacttaaagcttcaatttgattgtgtgtcagttagcattaatgactccattttggtatgacctggtcttttagcacctagtgaaggagctcacatcaaaacaatgcccttttttaaaaaaataaaaataaagcaggaatattagtacatgctagttatttccatagtttttatcctttgtgttatacttcaaacacttcacatgttcttctgtcttctagtctaataatcttgcttctgttctaactttctacatcaccttccacagtctttagttcatggtagctagagtcatgtttttgaaaatgttaagtcatgttctactttaagccctccagtattttactgtcattttaacttttaaattttacctagacagagaatctcactaggaaaacacaaaaggaagcaattaatgatggctttggggaccctggggagacttaacaaaagggaaagtaattcaggttttgataagtcagattttgttaggtgtgattatctacttaatagtgtttcaggagtacctactgtgtgtagggcaccgggatatttatactttaacaaatgattagtagatgatgtctttgaaaggaaattactgtttgtaaaagactgctttattgcattattactagatagtatatacaagaatatatattttttccttaaatataaacatttatttattgatgcctatttttgatgtgtattctctaccattatatatacctacttttattcagaaatgaagtagctgaccaagctatacactattatacataacatgtttctttacactttgtgtatctgtgtgtgtgtgggggggtggtaaaccagcaatccttagctttttaatgctgtatttcattggaaaataccaaaattaacattaggaacatgaagtataatcaactctatactaattacattgcatcataagaatgtgggttttgtttatggctaatttagtacctaatcttcacaaaattacagtttagtagtttacttatttaatctttttcataattgtttcactgattcagaaatgtgaagattatgacaagtttttattttgaggcatgtcatggtgcatataaagatgttctgttcttggatgtataccaggaatactttctgtgactgagaacagccataaattagctaagagtttttccctataacaagactggctttgagctttggctcttcctgccatcagcctcctgggtgttgggatcacaggtatatatatatactgctgtacctcacagagccatcttattttaaagtatatctttgatgatttcattggactaaaaacagataaaatacaaacatgagcaatgtaatgtctagaaaactaaagttacttcatttggtcattttaagtgttggtgttttgcctatgtatatgtatatacacatatgtgcctggtacctgccagatttcctgggactggatttacagacagttgtgagccgtcacgtgggtgctggaaattgaatcagggtcctctggaagagaagctgttctcttaactgctgaggcatttctccatctcttttattcctagggattttttttcaatcctcattttaaaaacttattatggtcttccctacagtttatctacccaagttgctaataaaccaaaatattagcatcgtgttccttattgattgattcacccaatctgttttagatttgtagttccatgaaataaagaacttgattactattggcttaatttgtgtgtcctatctgtggccagagttggtagatgaatgctagatggtctgtgagcctttgtgtgttgtctcctgtcttctgtctccatgagattgccagagttacatgtgttcactgttgtatctgatgaagtcatcaggctttaatggcctcctggaatgccattttatttatttatttatttatttatttatttatttatttatttatgagatatggtcttgttttacaacctggctggccttaacctcagagatgtgtctacctatgcctctcaagtgccgggattaaaggcttgtgcctgtctggccagtactgatttttgaacactgaaagttgtagttttgcattaattcacaggattgtttatctttttcatttcatttcatagtaaatttgtttctgtacttgtaagctattggaagctttgctaatttcaatcatctttgctatatttagattgaaattatcacttaatatttgcttctcttgtgactaatgagtttttaacctctgtactgaaaaatagctttaaataatactctttaaaaaaaataatccaggctttagtcattgacttgtttctatccccaaaaaatttctaggcagcataaaatttgagatagcaccaaaggacttcctacacaatgtttatatcttaggttttgtagaatttccctaatagaaaattaaaacaattataactaatttctctgaagcaaatctctaattcattgaagtgatttctttaggtctcccatgatcttgtcaacgaggagcacacaaaccatctcctgcaaagctctgttcattgtccctcttggatggatggagagaagatgagggtgctatctatataatatacacagtgtattgtcttgagatctcttgaggcagaaattggtagactgaataagtacttttactacaaatgggatggggaccccatgaactacttaggagcatctgttttaaccactcaaaagtaggcttattcctctagagcagtggttcttagccttcctgatgctgtggccctttaacacagatcctcttgttgtggtgacccccagccataaaattactttgttgctacttcataactgtaattttgctactgttgtgaattgtaaatatctgacgtgcaggacatctaatatgtggcccccagaggaaccgtggcccccaggttgagaaccactgctctagagttgttggtctaactaggttagtcgtcagcaggtttttttgtgttctttgacacataatattgaaaaagaagtgtggcatagaataaggtgacatttaatcacattttcccaaaaaaacattagaaaatttgaaaggggaatgtattgttcagtaagaaattgacctcatctttattggtgtgtctaagtatcatctagtaacaagtaattctgctcttttccttaaaaaagaatttatctgtgaagaagaggattttaaatccagtaggatccttagaaaccatcttttagtcttttttatttagtggtgtgtgtgcgcgcgcactcacgctcgtgcacatgtgctcggtaagtgcctgtggtaaccagaggcatcggtctcctgactgtaattacaggtggttgtgagctgtccagtctgggtgctgggactcaaaattgggttgtctgtgagagcattaagctctcttaatccctgagctctttcttcagcctcctattcatatactttcaaaggaaaaaaagatattcaagtacaggatattaacttgactaaagggaatgaaaggaattgatcatgttgttagccactgattattagttttatttccatgtttggaagaacagatactcctttgactggatttgttagagacgtttaagtgatcctaatgataaaactaattttgtccacaagcagaaaataaatctcagacaggccaccatcgtatagttaaacaagtggtggctaatgtatgtagttgtattaatagatttattcatttagaataaaatatttgtggtgttctttgtatttttgtagatcccaaaccccacccgtactgtactttgccactgtttgttgtaaactgacgccatgttggcttatcttgctcatggctctgtggcttaccttgcacttcttaaatatctcatttgaattttgtgttttacagtgaacagagtatctgtcaggcaagagctgctgtgatggtttacgatgatgccaataagaagtgggtgccagctggtggctcaactgggttcagcagagtgcatatatatcaccacacaggcaacaacaccttcagagtggtgggcaggaagatccaagaccatcaggtgaggggctgctgacagcctttacagtgtgtgtttgtgcacacgtgtgtgtgtgtgtgtgtgtgtgtgtgtgtgtgtgtgtgtgtgtgtgtgtgtgtgagtgcacacgtgcacacggggaggccagagcacagctcctgggagtctgtttctcttaccactttgtccatcaagcctcaccgagcaggagctgttttatgtgtttttgtcttcactagattgtcttatttggacatccaaatggccaatttttataatctaaattcagaatagtcgaagatgaaatactatgtaaagagcacattgtatgcttttggaactcatttgtttattttatgaggctagagaaaggatttgaatgcataaatagtttcagaaagtattgttaaatccataagtgattttttttttttttttttttaaagtggaaggcatgacttgtgctggaataattgggcttttctttccaggtaatatcgaaggtcacagctgagcttttggtaattccctattccaaattttcaagaaagtaactgggttgtatgattacttaatgtcttaatcagatccgggtcagggctgttggcagagggaaaggtagatcaggccttactggtgttcactgtatactagcagcaggaactttttttttaattaaatattttatttatttattatgtatgcaacattctgcttccatgtatatctgcacaccagaagagggcaccagatctcataacggatggttgtgagccaccatgtggttgctgggaattgaactcaggacctctggaagagcagttaatgctcttaacctctgagccatctctccagccccagcagcaggaacttttactcgttatagatttactaagtacctttggaaaagtattttccaaagatgtaatctaaactaatgttttaaccatcttgctacaaagtacaaagaaaatacagctaaattctacctggtgccctgtgagctcttgttaaaagagagattaataattttctaataagacgtaatgtaaacatatactgactgcaatagccattgatttgaagttggttggcaaagtgttaatagcttgggatttatatttgtcatgcatgtgtgaagcaaatgggcattgatacttgtacttttgcacaaaattgggactcagagaggctgtatctcataaaaagaggacaaagagaagagccctttttgtctgaggagatttaggagtttccctaggaaatagaaactgcattgtgcccttatgtaagtgattgactgacgcaggttgcagtgaaagtcttaggacacctgattgaaaatgcagtgcttctctgatgagaaaagcttcagggttgggttgggttagtctacagaaattattcacctcttatctttgtgtccccttcctcctccctagcctctcctttccttctgtgctccaatttcctcacagcctctagtctcctcagtgtctctacccaaaactccactcctctctgcctgactgttgttcagttatgctctttctcttttcatccatcctccagcagagtagtggtcccttcggttagaccagtggttctaaactttcctaaaccacaaccctttaatacggttactcatgttgtgttgacccccccaccatacaattatttttattgttacttcctaattgtaatattgctagctatgagttatatgtaaatatctgatgtgcaggatatctgatatgtgatccctgtgaaagggtcatttgacccccaatggggtcatggtctacaggttgagagccactgggttaaagccatgtcagtactacctgtgatgctgtggagaaaatgaaaactaaaagataaaaactggctgggtggtggtggctcacacccttaataccagtaattgggaggaagagacaggcatatctctgtgagtttgaggacagccaggactacacaagagaagggaaacctcttgaaaaacacaaacaacaacaacaagaaggacctttaaaagttgttggacatttttctcctgtgtatggatgttttgcctgcatatatgtctgaatcacatgtggaggccagaaaatggagggctcctttaataccagcacttagaagacagaaaccaggtagctctctgtgagttccaggccagcaagggctgtatagtgagatcctatcttcaatacaaacaaacaaaaataggaatcattttttttttcaattatgtaacctttgaggaaggacagaattgtaactgatctttaaaaataagaaatgtagcctagtgtggtagtgcctgccttgaatccctgcatttggaggcaagtggatctctgtaagttcaagaccagcctggtctacatagcaaattataggacagccagggctttatagcagagggatcctgtgatcaaaaaactgaaaacaaaaacaaaaaagtatattatagtttcacttagtgaatgactgatcatgaaagcatactatatgcccaaactgtgttataatctcatgccatcagagtccacataagtggttcttccatctaacacgaacctattcatttttaacctggccataacactcttttaaattcctttttttttaagatggctttttttttaaattttattttatgtacattagtgttatatcccctggaagtgcaattacacacagctgtgagctgccatgtgggtgctgggtattgaacccaggtcttctggaagagcagccagtgctcttaaccactgagccatctctccaccccaaatatttatattcttatgacctgctagggtattgacgtcatctgtaaagtcagcttatgactcatttccctatcttctcaacaaaatggtttcttttatgtccttgctgtaatttattacaacttgagcattttacagtgcatctttacctaacaagcttaatgttcatactcttcagaagataacatcagacaaaaaatacttgttatcaagtgtatctttttaactttgctgtatgtctaaccagtagataaaggaaagaaaagaaaatgtacaaggattaaaaagggagatatgaaaaagttagttgtaggcaacatgattatttggagggaagaaacctgaacataaatgttagaattaatacatcttagattagtaataggttagaatcaagaagtaagtctaataaatgctctaggtatgttgcatctaaaagtagtttttatctgagttagaaaattcctttaaccgatactgtttataatagtgtcttagtcttagtgacttttctgatgctgttataaaatatgctgacgatagcaacttaagtcagaaggaacagcaatctgactggtcacattgcaccaccaactaggaagcagagaggataggaagtgaagccaggctgtagatcttcaaggcttgcctccagtgacccacctcctctagaaatgctcagccttctgaaagttctacaactttgtcaaacagtgccaccagctagggcccgtgtttaaccgtgaaccctggagaacattttcaaaccaaataacaatgttttatcaaatactggacaaatttatgataggtgctcaagataccaatacagagaactattgagtgttaaagccaacctaaataaggaatatgtgatattcatgagataactctgacatcagtgatcaaattgttctgttagcttcagtacaatctttttttgagacagggtttctttgtgtggcactggccgacctggaactcagtctgtaaatcaggctggtctggaattcagagatccactttcctttgcctcttttgagtgctagattttaaggcatgtgccacccctgccctttttttttcttcattgcaatcttaaatttggagattgacaatgggtgtgtaaatgggagttttatacaaagaaccaaaaatagctaaagtagtaacgaggaacagagtagaagaacaaagttgagtggctgagacccggcagaaagcttcactaggtaagacactagagttgggcaaatactcgatatatttaccagtgggacaaaacacagtttgtgataaaaggttgaccttcatctttgttcatagaagtgactcgggaacccatctcacaccataggcttgaaccaattccagttgtactagagatacagatgttagtggtaagagtaataaagcttctataagacaaaatgaggtagtatttttattacttagattgaaaaatatttctttaaacagaacacaaaaacattaagagaaaaaaggattactaatctgaaataaaaggtggatatcactaataggcaagttatggaatggcacaaggtatttgtcacacagataccttccctttgggataatatgtaaagaaaaagatgaatcatagaggagagaaatggaccagagtaattcacaatagaaataatttggagaaaataaaacacaaaaagggagcctatgtatgtataacttagtgggtgaaggcccctgctatgtagtctagcaacataagttttatctccagaagctacataaagatgggaagagaaccagagccacagagttgtcatttgacctctacacatgtgccatgacatgcatgccttctcccgaacctcattatgcacacataataagttaaattgtttccagaacttgaaaaagtactaaaactcactagtgagctgcatagtgtaatttacactagaacacaaagacacacaccagaattgctataaagcaaagactaacattatcggtagtaatgctgcatggtatatggagtcacacaaattttcatatatggctctggaagagcacgtggtaggataatgtggagttttctcctgaaattaaatgcaaatatgacctatgctaattgtactcatgggtgcgttttcagtataactatgtgctatgtataccaggcgatgcttcgtagaattatcatgtccatttgtaggagcaataaattctgtgcaataaaaatgctagtgcaagaatgggcagattgatataaaggaatattgcataaaacaatgaaacttaacaaaccatggttgtgcttacaagtggatgactctcagatatgaatgtgaggagaggacacgtacatctctgaatccacgtacatggattcttcctttttctctctctcttttcatgagacaggatttctctgtgtagctttgaagcctgtcctggaactagctcttgtagaccagattggtctccaactcacagagatccacctgcctctgcctcccaagtgctggggattaagggagcgcgcctccgccaccgccaccgccaccgccactgccaccgccaccgccgccgcctggctaaacatggattctgtaactctgtttttctggaatcctcaggatgggcggcagcagggtgggcgggtgtcaagaggccccttatagttaatattccagttttgtatttgtagttttccaacaaacatgttaaagtaatgaggtgcattgcttttcttttgttgaatttactattttaacacaggccttttctaaccctaagataccttaagttccgtcagactcatttcttagttttgacaaaaagtctgctaggaacaagtttaagtaaatagcccacagccagggctggagagatggctcagaggttaagagcactgactgctcttccagagatcctcagttcaattcccagcaaccacatggtggctcacaaccatctgttatgagatctggtgtcctcttctggtgtgcagatatacatggaagcagaatgttttatacataataaataaataaaatcttaaaaaaaaaatagcccacagccagggtttgtgttggcttatattattttcccagttgtcagcttgactttattgaattattgccttttaggtcgtgataaattgtgccattcctaaagggctgaagtacaatcaagctacacagactttccaccaatggcgggatgctagacaggtgtatggtctcaactttggcagcaaagaggatgccaatgtcttcgcaagtgccatgatgcatgccttagaagtgttaaattcacaggaagcaggtaaagtgtctgtgctttccctgtattctccaactgaaatgttatgtatatggtaaagcaagccttttttgtcaacttctaagatatatatagatagatagatagatagatagatagatagatagatagatagatatagtaattcctaagttattttctacaaaaatgtgaactcttctttatgttagaagtataatcttaaagcgtaatcccatgggtttagtctagttatttcttaaaactcatttgaaattatttagattgttcaccctgtcctaaaacataatttttgatactaggacacaagagccatcagagatacaaggtttctctgtgttgctcaagctagcctcaaattcttcacttcaggcaatcctcctgccttctgattaccaggtagctggtatttcagtcatgccattatgcctgatgttatttgctttttatgaagaaatacataggtttctaaaatacatcttttaagccactgctgatcttaaggatttaaaattagaataagatctcctaatggataagagcttgactataacacagtggtctcaaccttcctaattcttcggccttttcatacaattcctcattttgtaatgatacccaaacataaaattactttctttgctacttgtagggagacaccgtaaccacgcctcctaagggctggctacaggtatgactgaccacgcctgacaggcgtggtcaaggtaaggtcaggatgacttgtgataggtttttaaggggctgcaaggcacatgggggccccttctctctggcctgcctgccttgctgtccctggcacgctctggcttgcgtttggctggtgtttatctaaataaagatatctgacccttatggactacggattgtctctcgttatacctacttcctaagtactttcatttccattgtgaatcataatattaagaactgtgttttccaatgtgaaagggtcatttgactcccaaaggggtcttgacccactcactggctaggaaccactgctataaaggttgtttgagaatttgagggatgccctcagctggtgaagtcatagttgggattctgaaaatacatgtatcttagaagaacagaaataattaactttaaaaggctcaactatttgaaatcttatgtcagagataaactaaatttcttttggcttaatgcaatgcatttaaaatcagaaaatgttaaatatgaaaaaatacaaattacttgtatgtttggtagttattttaatgatatgttatttgtagaattaataaggagtattatagccagttgaaatattgatactttgctaatgacacagaattctaaaaatccagcataaatgttacttattaccttactctgaaaataactgaaacataaaaaggaataaggcatctaactcctttgttttaaaaatgagttttagaggaataggcatttggggatcttgcagaagggtttatgccattatacctgtacctgttttatatcaagttttctttggaggaaatcagtgtctataaggaacatattttgttctcatattggatctattttgagaaactaaaccactggaacttattctggtttgtctcagaacagaaccaagacagtgaagtctggtctcctgtagattgtttctcctcgtggctatactgtttttgtcggcaccagtgctttattagcatatattatagaaatagatttacactgtagtaattgataaaggagctagaatcatgattcatgtattttaaataggtcagttatataatttgaagagtgtgtgtatatagcagatctgtcttcctgtgtttagaatcaactaccattttcatttgttagccttaaaaggaggtccagttaagaactaattgtcacttatagttcaaattattattattattattattattattattattattttggtttttcaacacagggtttctctgtgcagctttggagcctatcctggcactcgatctggagaccaggctggccttgaactcacagagatctgcctgcctctgcctcccagtgctgggattaaaggcgtgcgccaccaacgctcggcgttcaaattattgttaatgttggtttttgttatcccagtattttgaaaatactatttttatcagtgagtggtattagtttgttttcaaaatgcaaatggcaagtactggttttgttctgactctgattattggacattgagtcttaaagtggagaaattcagattaaaatcacttacaaagcaatagacattaagaaatagttttgaattatacaaaaatttgcccataggaaaaccattgggttcatttgctatagaaatatcatttttgctacgtacaatatgtagggttattgttatggataagtttgataatatattgtctcttctctttcacaattttaattgtggttgtagaaactggttgggattatctctgtcatggacctagttactatcagtgaagcttttggctctatcttgttcattctcagataaaacaatacattggtatgtagatagcatggtttatttatttaggaaattactttttattataaataccaatctgtgaattttgatggtactaattgtccctgaagtggaaccatgggaagaaataaatgttaagaatctggagtgttggtggcgcgcgcctttaatcccagcactggggaggcagaggcaggcagatctctgtgagttggataccagcctggtctacaagagctagttccaggacagcctccaaagccacagagaaaccctgtctcaacacccccccccaaaaaaaaaaaaaaaaaaaacaactggagtgtcatctttaatcccatcacttgggaggcagaggcaggcggatctctgtgagttcaaggtcaaccagggctacagagcgcccctgtctcaaaaggtatatggagagttcttccttggaaagggatgtgatttcttgtgcagattgtcacagcaagataggtcctttatctagtgttgtgctggtcccctctcacccacctaaacaagcatactaaacaatactgcatggcagcctgatgttagcatcctttgccaaagctctttactttgggttcacaaccagaaagaaagaaagaaaatcatatgttgagatcatctgttgaaatcatctgctatccttctgctaacccaagctgttggaaaagcttgacttcagactcttctgtaaacagtagcccaacacaattgacaagaatcaaaaaatcaaacttacctgtgaaagcagaagttttacacaccagtgtgcctattccttaaattttttttgtctttttaaattttattggtatatattatttgtacaaaacaatgaattggaagaggttatgtatacataatgtactttgatcatattaatctcttttcttcctctctctctctctcccttcctcgttcccttcctcgttccctccctccctccttctctccctccttcctccctcctccctccctcctccctcccttcctggtgctgggaattgaactgagcccagggccttgtacatgctaggcagtcactttaccaatgagctacattctcagcctgctttactactttatcaagccatattccatatttactgttactgcttatatatggttggtgctacacaagaatcagacattgctgttacctgttaagttttctttgtgattctcagactttaaggtcataggcgtctttgttcagacagaatttttttctgaagctcagtacaaatgaagagggggcgcgggggggggggggggaaggaggggggcttctgataactgtggggcagggttacacggctctccagagcacaatatagcagtactgtatatctgtcagtctgtctctctctcggttttttgaggcagggtttctctgtacagccttggctgacctgaaatgcctctgtagacccaggctagccttgaactcacagagatccgactgcctttgcctcttggagaactgggattaaaagtgtgtgccaccaccacctggccacagagctctcttttagcccaaaccaatgattctacatttctcccttcttttgctgccatcctccaaagccctgtaagtcctcaatttgtttttaattaagaaaagaaatgcagtgttttatggactagtcattctaaccttcacatgctacacttgtatatatgtttaatagttttggttttttttgaaaaaggtaggtggcaggaatgttttcctttattttgtttttaatatggtatgcaattatctaatatactggaaagtacaggaggtgctaaatacagtgagttatatttggaattaaaacatgtgattcctgttttttttttttttttttttttttaacattttcaaggagctgattaatgctcttgcctttaccaaatgctacagtataacttttcaccaatggaaattgtctcagtttaaatatattgtgcagaccaactttttttttttatttctgcatttacttatcaagatatctacaagcttctgtagataatagcaatggattatgtatgttacaatgtcaatcttgttgatggtttgctgaggtaaatttgcacagccttgttgcattttgtaaatggtttaaatcatttggaaataggaaatgtgtttttcaacccatttttaaaaaaaaaaaagttatgctagttattctgtttttgttcaaccaggattaaacatagctttaagctggcaaagctaccagtttcccaaaacctcaaaatattttaccactaactaaaagactgagtttgttttgtttttttaactgttgtgaatgagaacatagcctgagataaccttatttttcatcagatttataataaattttggggattctattaatttttttatcataaacctggcctaacattacttcctatataagcattgactttattctcagtgttatataatacctttatgatatacttgggatctgagaatatttccagaagttcttgaggttttaatttttcttttttgaagcagaatctcttgtgtaatcccggctgtcctagaactttctatgcaaaccacgatggccctgaactcaaagagatcctcctgcctcttccttgcaagtgctggaataaaagtcatgctgcattattataccaggccctgaaatactttgttcctagtgatagttttactttctagtctcctgggttgctgatatgaataagaacaacactaagcttaggatctcaaaattgtactgtgctgatagccaccgagaagaacatcagtatgataaagcccatccctttccttcttgggttttacacccagcctagagctatctagacgagtcaggaacattggaatagtccaagaataaagtttgaaatacagtctttggattgccaagcaaaattctagggtcagagcaaactttgcaaacagaaggtgtttgggcctcctcagtgagagaatattgtgagtggacttgtcatgggagccatgtgataattggcaaacagatcgtgttgcggttggagcatgagagcttatgtggtctggggcatagagaaagcctaacagacaaggctagaaaggtttgtagggggctggtggtgtcttaaggatcattctgtcacttgccctaaggcaggtagtcaggctgtgctgtagtacagaagtggtggagtggtgccatggatgaacatgtcttgataatattgataagaaaggtgggaaggagcacggaagagaggcaaccagcttttactgagtgcatacttttcccaccatgttaccattttagcttctgctatgtcttcatttagtcattacattcctgagctggacttgattgcttatttactgtgtttctgatctttttttaatatataaaagccctgtgtgtttagtgatactactgtttcagaagtagaatttgggtttaaggccactagactggccataggacctacaaccggtcagtggcctttgttcctagatgttattttcaaattcagcgtcctctcgctgtgacataggaatgagtaaatgatgtttccagatgatatccaggcatgtagcttggagcactggtgaagttggtgccatgaccctgaggtggacagaatgggaagaggctttatcgagatgagtattagttctgccatgctgtatttagagaactttattagcacagctctaataaaatcttatacgtttggacatggagaggactcccatactgatcttggatgttgcttttgctttgtgttgttaggtttcctgaagtaatgggcctgaggaggtgacatctcctctctgggatggttggcatgtcacatcctgctgcagttgcaaattcatgtccccacttacacgtctgccatttttacagtggtgcaggggtagtgtctagtgtccttcccagcttccaggtaacacatgcacgtggagagttggacctttgcctctagaaagggatacaccaaggagacggcttcagtttatagtggcggagttccttccttccttccttccttccttccttccttccttccttctttcttcttaatttggttttatgagacagggtttctctgtagctgtggagcctatcctgaaactcactctgtaaaccaggctggtctcaaactcagagatccgcctgcctctgcatccgagtgctggaattaaaagtgtgcaacaccactgcctggtgattttctttctttctttttactgcatttttctgcctttcaattcaaaatctctaaggcattttcttttaaaaagacatctgaagctgggcgttggtggtgcacacctttaatcccagcactcgggaggcagaggcaggcggatctctgagtttgaggccagcctggtctccagatcgagtgccaggataggctccacagctacagagaaaccctgtctcgaaaaaagaaaaaaaaaaaaaaaaaaaaaaaaagcgccagtttagagtgagaaagaaattagaaaaaaatttatttgctttttgtcttgtgttccatggtaaagttttaagaccgtccatgtgacttagtgggaaagcctgaaattggaattgagtttccagttttgtcccatctccagtgggctgtaaaaaggtttccgaatttactgagaatggttaatcagtgtggcttgggaattggatgacatggggccactggcattcttaatgcaggctaatgaaacaacagcattccatgcggagtagcttactttgagaatgcactttgtcagatccccagcttccttccttttacccctcactgtgaagaaaattattgtctgtagaaaagtttgagtgcatctgtatatgcaaagaggaattaaagaaaagtatgttctcagtgtctcagtattctgctcttaaaacatgtctgtaatacaagagagaactttgtatctaaggacagatgacattctgacactaaccttgggcctggacaaaaatacaccccacacctgtatacgcatgaaaatagaaaaaggaaataaaatcagagaaccaatgttagaactagttttgttacttactaacattttacataatttatgtgaatgtttgtttttattggagatgcagagtgatgttctcagagcagtggtcaacttgaaaactaagtaagtcggaaatgactgtcagtctggaacacatcattcatcttagtgatgtcaataatgcccggagctataagctgttttgaggctgaaagttatgggctctttgtacagatactctaacctgaaataacaagaagttctaattaacattgggaacgttttaagaatgtcagggtcttatggttgcacaggatactgataggtacactatagccatagtgcctgaactgacatgactgactgattttcagtgacttgtgaaagaacaaaggttaattatacatacaactagtttggacagagtcacactaaatactaagttaaagagatttgttaaagtggtaagagatagcacagccattaagagcatttggttgcaagcctccacgtggcagcccccagccatctgttaattccagtttcaggtgacctgatgccctcttctggtctccaaatgcattgcatgacatggtatgcacacaaaacatgtggccatcatgcataaagggaggggtattttatttttatttttatttttttatttttatttttttatttttatttttttagagagagagagaatgtctaacttttgaaaaagaaaaggaatctactgaatcacttttactttctctgccccacctattatagctcaaagcctaaattttcacttcagtgtgtggttagacttttcaatcagaaaatgattggggtgactaatttctcagttttccccagagagaataatttaggtgtcttcacctgcactgtgtgcattaggcctaacttatcttagaagactgttttctgtgtgtttccctttcctcatttcagcttctattttcctggtcttcccatttactcacaagatgccattggagttgtggactagcattgggataagaaggtttctggttttcaagaacttcttaaatgccagtgttctcatttgttctcttcagctttatctgttaccattcatattgacttacatttgaaatagtttcatgtctagttcttcttagttattgaaagagaaattgattagataagaaatagttagcccgcctaacagtgcagactgtcagcaccaagattactacatagattgctctgtgtttgagtctcactatgattttcttctttgctaaaccagaggtagaatcaggaatcttgaatttaaaaccctcacttagggattcagtaaattcggcttaaggacacttgaaggagttcctgtctagatctctacaaagtgttccattaaaaaaatattttctctttattatacatttgaaaacaacatactgcagcatattgaatacagtgagaagaaatagtccagttgccttctgtgaagccaaatagcaaagggctttattttagtcccttttcctgtaatgaaataccaaagagcatctgcattataagaaaagtttatttgccgacagttcagcacatttggggagtatatacacaggcttcttgctggactctggtgaaggtctgtaacaggtgaaatcatggtggtggtcacacacatgtcatcaggagatcactttgccagactagagacagcagaaactgatctcctcttagaaaagccctcctgtggccaggcatgcctttaatccttgtaaactcaggaggcagaggcaggtggatctctgtgaattcaacccgggctatgcagagaaaccctgtcttgaaaagacacacacacacacacacacacacacacacacacacacacacacacacacacacacacacacacacacacacactcacacactcaaaaaagaaagaaaaacaaaaagaaagaaaagagaagccctcctgtgactgatccagctcccttctgagggcagcactacaattgcttccctcaaggcaaaacctcactgataagaaacctgcaacgaatccattgtgggagacagaccacagggcttctaaaaatgtaaatctgtgttcgagtcacatttgttatttcactgtgttactattttagatgcacctggtattttagctttttgtcttctaaataaattcttacacattaaacttgaaatgatttaatattaaaaatcatagtggagccaggtggtagtgatgcacacctttaaccccagcacttggaaggcagaggcaggtggatctatgagtttgaggccagcctggtctacagagcgagttccaggacagcctccaaagccacagagaaaccctgagacaaatcttgagaactgctgcttcagtattctctgcttcagtttagatcgtctagcaaggaataactaaaagctgtctattgggtaggaattggttgttcctatttttctttattttaataggtagatagagtttctctgtacagccctggctgtcctggcattcactgtggagaccaggctggtctcaaactcaagagatctgcctgcctctgcctgccaagttctaggattaaaggcttgagtcaccacagccagctgacttttcccccttcccctggttatattatatgaattctttttatgtatgtaaattgtaataaatcatactattataatactttcatataattattatataattttatgtctctcaacatcagtacttgggaaagctattttagtttggttataacttgtctgattgttttagaacttcttacaccctgtaacagtttcatacctatacacaatgtgtcctgggcattttcagccccatttcaatcctcattgtactgccctgttgcagtccctctccaaccttcatgtctggttttttgtttttgttttttaatcattaatcctgttagtgcttcctgctggaatgctgtctgatctggttgccttgaccttgtgcaggcaaccatggctgcagtagccttgtcaggtctagaagacagcatttcgtagccctccttcccaaccttgctcttagattcttcttgtcccactcttcatgaagtctcctgggtccatgtctgatttgtagggagcaccaccttagtctcatctgaagtttgttgtcctgcaatctgcctcacatcctgtttctctgcatatctggcaaattgtcttcagatttgccttacactaagctttgataacagtgccactgctgtggcctgcagggatcatctgtttatttggatacttttcctccacaggcacagtaatttgcacacatttgtttcacctgtatttgcgatttttattggtttttgttcatgaattagagaaacattttactggatgtcattcagtcagtctggtatccataggacacagaggacaaacagacttgaactggatagcccatgtcttctacgctgatacaagaaatgactgggaaccacttctccctggatatagttgcagaacagaatggcaaccaaatctcccaccgattttaccttttaattctgaaaaaaatatatatatataggtgtctcagcaccagcttatccatatccacatacacatttagtatgttgcctctgagtcaacactatgcattcttgttttcttagtcttgacaagatagaaacatctaaccaacgttttaaataaaagcttcaatggacagaattttcatattcatatttagataccatgttatatgatactagaatagtaaaggaacaatgaaataattgaaagttattattcttatgtggctttttctcgtatagagaaaataatacttggttagaaaattctgcaaggcagtgtaaatactgtacaaagaggtgcttgggaagtaggtttgggaaataaatttagccaatatagcgtgctacttgtgtaaagtttctaaaaatggttcttctgaggtagacttgctatttctgtaagtgtaatttccaagatcattcacaagaaaaaacagataagttgggttttatgaaaattttgcaggtttttgtttttgcggacaaagtctgtctcagtgtttctattactgggataaaaccataactaaagcagcttggtgaggaaagcgttatttggcttacacttcatatctcatatcattgaaggaagtcaggacaggaactcaaacagggcaggaatctggaggcagaagctgatgcagaggccatggaggggtgcttcttcctgacttgctcaacctgctttcttattgaacccaggaccaggaccaggaccagggatggccccacccacaatgggctgggccctcccccatcaatcactaattaagaaaattctctacagctgggcattggtggttcacacctttcaacccagtacttgagagtcagagacagcaaagtaagtttgagtccaccctagtctacaaaaggaggacagccaggacagttacacagagaaaacttgtctcaaaacaacaacaaaatgctctacagctggatattgtcaaggcatttttttttttttttaattgaggttccctccttttgtaactctctcacgttggcgtcaagccagccagcaaagccctggctgttttggaattcactgagatccacctgcttttgactcctgacttctgggattaaaggtgtgtgccactacacctggctggagtattttgttgttccagtgccatttatatcagaagaaataaatttttactaagggatttgttgtggaaacattgtcctaatctttcattctcaaaccttggattggtacagcactagtttgaaagtattgactagataaagtgatgaacacccaccaatggttgtcttccagtcttctgcagactgtactggcactttgacagtgtgtcactaggaagaaggtagcatgagcttttgcacgatggccaaagtgttgtagataaccctggtgcagcttcctgttagactggtacgtgcttctcatggtgttttcatgacccacagactcataaacacacctacaacccagctcttaccagtaccaggagatttgtgggtacatctttctcttctgtacttttctcagtgtattctaaatgattaatttctgagctatataaaataaatcaagcaagggactggagagatggctcagaggttaagagcactggctgctcttccagaggtcctgggttcaattcccagcaaccacatggtggctcacaaccatcccttatgagatctggtgccctcttctggtgtgcagatatacatggaagcagaatgttgtatacataataaataaataaatcttaaataaataaataaataaataaataaagcaaagtcagagctagccgttgtacaaatgtagcagcccttgctccatgtaaggcttggaagtgatgctgtgaaagtgttttaagaatgcgacattagcttagcaggagtggtgacatctttaatcccagtatttgggaggcagaggcagatggatctctgtgagtttgaggccagcctggtctacagagccagtaccaagacacccagggctgcacagagaaatcctgtcttgaaaaacaaaacaaaacaaaaaagcaaccttaaagtgcccattactttgaataaatttattgtttgtaattcaatgtctctgaatattgccctgcaatctggaatttggttgtttttaatgtttttcttaaagattttttttatttattatgtatacaacattctgtttccatgtatatctgcacaccagaagagagcaccaggttaaattgtagatggttgccgggaattgaactcaggacctctggaagagcagtcggtgctcttaacttctgagccatctctccagcccccgtttttaaagtttcatatttttttaattaaaatataaattacatcatttctccttccctccctctactctccccccattccctctcaaattcatgacctctttattttttccctttgctttgctttggtcccctgcccctccccttctcccttccccaccgccatctaccctcctgccccccctcccctctcctctttaatatagccctggctgccctgaaactcactctgtagaccaggctgacctcgaactcacagcgatcctcctacctctgccttctgtgtgctgggattaaaggcataatacataatacataaatacaacctgtttagtctgttttaaggactttttatttttatttgtttattttttttaatgtaggtaactactgttgcagtacctgcctccattctattcttaccttagcctttgttttcacttcctctggatcatgaagggctttattgaaatgatcagaaatgtgaataccgttactctaactgctaacattgagctctgtcactcagtgatcagctttccaggaaggcaaaccaaatccaaaccagtctttaagcaaacattatctcatttaatcttagaaatacaaaatgctgagatagacagtgttccccttactaattaccttgtgaaggctaataggtaataatagaaaccactaattttttttaaagcataaatgctctaaaggtctgctgtagtagttttatgtaataataaaacacatgcaatagaatgataaggatcaaagctaagaagcctgtcattttccattacagattacctcacttgaagtctttttgtttccttgtttttttttgttttttttttttaaaaaggtcaaatggtaaagaataataagggcagggtgcaaaccctgaagggtgactgtttcacaaattgcattaagggacagataagcattggcaagaagatcagaggccagagtagttgataaagagggttatattacctgtagaaacatcacaaagaggttaaattctacattcttggttaattttcattgctctaggtttgtttttctttgcatttcatcccttcccttagccctaactaagcctcttgtcatatagcttactttaaaaaagtgtcttttcatagatgaatgctagcattaaaactggtaatactgaatttacatgtatagtcttctcagatttagtaaagaaagagttaatggcatcaacagtaagcaggaagctgttagccttattcatatgatggaatgaataatttagtatattcgggaaatgcaagctgcagtagaatttaagaaaccctaccagaaagtagatcaatgttttgcttgttagcagaaataaaagtcaccagaaagaagatgcttcaagatgacaggtgcagggacactgcttagcagttcagttgtgagaaagattaggagttcttggttggaaatagtctgcagtgacagcagtgcctgcactctgacaattgtcaggtgacttcctgccgaaatgattgctcatgggatggggccgcttctttgctgtcagaaacaagatattttctctggtttttcatgtgagttttttaattgtcctttaatgttttcccatttaatatgcattaaaggaacgaaagggttaaaaacctgataactaggcatgtttactaatagagatttggtggaagtagcatctataaacatgagtgagaaagatttttataaaggagtttaaatttaaaatgtaattatcataatttttctaaagcgtttagcataatctcattagcttgttgagcttgtcttcatgtgcctgtggttatgttattactcttaaatattgtgcatgcatctttgagagatgggtgggtggaagtacttgcaaagctggcattatcaattttattgtattggtgtttgaagtacctactgcatctaagatttcattgggctatgttgtcttgctaaaaatgattaaaattttttatttagatgattaccatattaagataagcccttgaatataaattggtttggttctgatttttgcttagcagtagttgacttatttaaaggatatattgaaatactgtctcgttcactttaatgtgctcttccttaaaccagcatgtatttaatccattaactgttttcttagctggtacccataagaaaagaaaatcctttccttactgaaaaggtttcctgagaaatacttgatgtacattttgcatgttattaatagtagaaaaaattttctcaaccaagttttaggtattgccttgattggataaagcattcctcttttcagaagttaccactttcgctttgagtttttctatttcattgattaaattttaatgtaaatcatttaggttaaatggccacacagtatttttagtaattcattttgtcaaatatgttttcatatctagggaaaaataatagtgaagtgtgtctctgtaaaccttgtcggttattattaagtacaaagtagtctcatatcagtaaacatatattacaaccttttaatgatagcctttgactttttccagctgatatgtgagcaatcataattaaattaatcttaagtattttcccctgaattttttttttgaatgcagttctcttaagtgggagggtagacctcatgaaattaattctgctggccatgtatcttaactttctatacttaattttcaccagtgttttaaaggatacagtcttaaaatgcagattgcattctttgattgtatgactcaggaaatatttaagctgtgaaattataaagttttgagaatgaggatctagataggacgtatgtataaatacattttgaacatttcaaagcaccttttagttaatgtgaagttcttcagatggcccctttgtctttcgaagcttctaacaccgaggtgtctgttccagcccagagcaaggttactgctacccaggacagcactaatttgcgatgtattttctgtggtaagcaacattatgtttacattactttttcaagctgtggtacatacgacttgcacatttccataacttttgtttcctaggccatagtctggtttgtggtatctgggatataaagcaggcttctgttttatgttgtgatatttgttgtggttcatgtaggtggttttgagttagcttttgagttggcttactagtgaggatttagttagaaatagaatcttaaaagagaaaatttttaaattataattttctttgggagcccacattcagttcagtttaagagaaggtatatgcatttttcgtatgatttgagtaatgtaaatgtgccttatttgaaaagagctttatttaccttgaatgaattccaggtgtgcatgttgtagaggcagatgtaagcttacttttttaataggtcggtttcaggtggcaatctcctctgttgagcaggttaggtttctgtggcttagaagtgaatttaggcttatagattgttttctgtcattctcataaacatacatgtgtgtacatacatgtattatttgcatggttaaattaggtatgtcacttagacaccccaggatggacctgaccaatcatttatatataaacatatatatacatatatatatgcatatatataaattttgtaaagagaaattgtttatatagataagtatgtaaatacatatcattgtttgaattatttatttctgtttgattctgaatcttcctgttttaaaaatccaagtttcaaaaaaagtcttaattatttgaactttttttttattgattcacgtatgcctttttgactatctataccttgactagctagattatttcgtgagagaaaactgtaaggtgatgtagctagcatgtgtactttatccatgagtcccagaatttttagtgtggtttctcagtattgttgatagggtttcttaatgttgatatgcttactggtttaggcaagcatactataaatgaggaaaaatagaaaattctaatgtatttcatgggcacctaagttacattgtgattgctccagctgatggttgcagcagtgagcacctgttttatgactggttgttataaatctctcctaccctctctcaggctgcagcttagcgctgtaggttgctcataccggtgacttcatttctggtgttgtctttccctgggatcctcctggcttctgtgaacaatcacggatacttgtgtgatgaggcctctctccagctcattttcaaaacacacttgatactgtaactttgtgcttgaagcttgagatccatgtgtagagtgagagttaacctatttttaaagggaaagaggtgatttgacctaattaatacaggtgaattcttaaaacttataaaataacaggttaaaacagatttcctttataacggtcctcaatttgtaagccatctacaatctaattgccaggtttgagtttaattgtattatatataatagcacctacttgtattgcggtccatgtggagctagattcacaagaattaaaatggggagagtaagcaaaatgtgctttaaaacaaaactcaatattggaggcaagactgaaccgccattcctgttggagggaggggttcatatcagatttccatcatttagaggatacttatcagcaacattgccatgttgtcttcgttaggaaaagtaattcacaaacatgtctttgcaacttctagccttgggcaaattaagaccacccgttgtctagttataaagtaaaccctcaggaagttgccatctttccatgcgggaggccagaacagtgtcacttatttctgcaccttggtggtttctttttttcccccttcaaaaagataactgataacctccatgccatgcatattaaaatattgtcatttgcccactgaggtggttatgaaagtacctattttactttttatgagaacacagatataggaaatgtaacacacatataggaatatggcccctttgaaaaagtagtatacattccagaaaatacagacactgatagccttgcctaaccctagtttctgctctctgttgcttatgtgatacctttgatatagcttaccaattttataacccattaaaatgctttgacaagaaggaaactgtaattgtgtacctctagttcataatttactagaatttttatcgaagaactattgtatgtttataattaaattatgtataattgcacatatatttcaatatgctagtttttacagcttggcaatattgatgaagaaaaaataagcagattaaatatagatgtcaaaaaatgccaaagggagggattttgagactgcctagataaacaaatggctcattatcataaagctacatagcaaagaattataagagttatttttagatcaaaatccccatttaaaaagaattccttgaagtttttctcatcttatgtgccaggaataaactagtgaatttccctattcagtttgttttatgagtcatatcatgatcgttagtttttttttgttttctggtgggggggttggtttttttttgtttgtttgtttgttttgatagtttagttttgttggtagtatgtaagtatatatagccctgggtgaccctgaactcaattctcctgtggttgcctcccaaatgctgagattacaggcatataccaccattctgggcccagagttagtttttaaaatgaacaaaaattgtttgatagtatcaagaagtttagattgaaattttaacatctctgacttgaatttatacatttcagctaaaacatggatttaattcattaatagaatgattgagatacagtgccttctctagatgtgagcatgacatggagcatactgagttccactgctccgttctttatactggccaaagttttaacactcaaacaatattattaaaagtaagtaaggcataattgtctttaaagttgaccttgcacaaactgattttatagttctaaaatgtaagtgtgtgtatgtaaattatacttccccaattttataggttcttaaatttgtcttccccattcagatgtctttatcttctgaaaggatcttttctctataaaacagtaagcattagagagtatagcacagtatgacagcttttttcaaaaagccattgtgttaatttcccaaacattctgtttatcagacgagttatattttcatttatgtaaacatttatgtctgtatttgactttgattttaaaaccagtttttgttttttcttgttaatcacatggggttgatttttatgttttctttattggttttcaaagtatcagacttgaatctaatcggatatattgctgcaattgtcatctaatttgtcattaagagggcaaattaaatggttaatgtaaaaacatgtaaagagatgaaaaatttagtaggtaggttgagatcatttcctgtttgtcacacctgggagatgctggtgctgtgttagacacaccctggtgagcctttgcttccagctgcagggttggctactccactaggataagatagctcctttcatgatcgtcactcacagatcactatgacatgttctagtacacacagtgtttatttacttccttccttatagtagtttctacagaactatgagaatttctgctaggggtttttggtggcacactagaagtcagaaatgtacttctcagagaatgaagaaagctgtcattactctcttgcttttactgttgtggattaaggtggttctaactcaaccttaggtattatactaggtgcaacattaacatctctcacttaattttcatatccagtgacaataagatttcccataatttagtgacagtctaagatgctagagatgggtctacattacatgcagatgtgggaatagacggtcagtggtttctcgtggcagttcatggtggtgtgaacagaaggtctttccctcccctgtcttacttcaaatgaaaagtcgttaagattacctataacattaaaaattgagataaataggttaatacagtatacgggagtttaggaaatgtttgtttcaccgatattggaaatgctgttccacgaaacagaaatggcagctcaagttgggcaagtgtgataaatgcattagcatacgtcagtctagtaacgaggttctcatgctctctctctctcctgttttttcatttccagtgttctatttaggtgagttttttaattctgatttttcatttaagttcttcttctccacctcatgaacaattacccccaacagactgtctcattgtcttaagagaatgtcaagctcaggtgcctattcagatgctcattgaacacttgttttattcaagctcttcatatataaatgtttatttttttcctttattgttggtgtttccatttgtttcaagtaagccttctgaagacgatgacagtattatgttgcagtctttcatttgctgtgtgttatgtaaagcttacattttattttgctagacaaaagaagatgcattttttaatatgtgacggttttatgttgttctcatggtttaatttcttccatctagctaggtagaattgtaacattcatctgtaatgtttccctcccttatagggccaacattgcctagacaaaattcacagctacctgctcaagttcaaaatggcccgtcccaagaagagttggaaatccagagaaggtaaatctgtacatttacacttccttcttttgcagcagacccaagggacactgacaatacatcatagccttcagttctttgatattgtgatttctattttattcctggtgtgaaaagcatacttgtggtgcatctaaaaatacatcatagacttagggcataaaagtgtcttttcctgtccatcagccttgtcctttttcagtgtgtgtccggaatgcactgtacaccggtgcgtgtagtgcaccgtttcatgtgtgctaaggattgcactagaggtagacttgaaatcataacacagtttcatcccttctttgccttttaactaaaatcaagcgtataatacaaccccattctgaattatccagaatagaccccacacacacacacacacaaaatcactttaacatttcaatatgaagtatgaaatcattaagacagtttatatgggattggagagattgctcaatggttaagagtaatggtggttcttttagcatctatatgtcatctgagagctatctataacttcagttctgccaggggtccagtgccctcttctggcccctgcaggcattgcatatacacactgcacagacatacatgcagacaaaacacccactaatacacataaaataaaaacaaatagttcttttttaaaaagacagtttatacctgacagtggtggcacaggccttcaatcccagcaattgggaggcaaaggcaggtggatctcttgtgttcaaggctagctagggctacacaagaaaaactgtcttaaaaaaaaaaaagtagaaaaaaaatagatagcttatatcctaattttttatcaaaattcagtgtatattttgtacttaaaacatttctgttcaaaataaccctattcttagtacttaataaccatatgtggaaatcattagagtaaatcttttaatgaaaatttaaataatttatgtctccaagatctttggagggggattttgtttttgttttttgagacagggttcctctgtgtagcccaggctgtcctggaactcgctctgtagaccagactggccccaaactcacaaaaatccacttgcccctgccctctgagtgctgggattaaaggtgtgtgccaccactaccacagggcagatcatttcctttttgtgcttgtccattgttcatattagtcagtactgagaggaagcccaatttgaagtatcttcccaccccagggacagtggcatataatctcaatacttagatggtagggatgggggattctgaatcaaggctaaatttttatatcatttatatatttgtgtttaaacataaatacacattcatatgagcatactgacttcattgtgggcatctatttgcatttgagaccgtgtctcaaaaatagttttattttctatatagcttcatgggaagctactgaatgttgtagtctgttaaaataagggaagaaatcaagaattgtgtaacattgttagaatctaattaaagagggattgaacttgaaaggataattcatagtctccgaacagcatccctcccatggctctccatgggtttgtctgaagggaaggagaactgactaaataaaaaattctgagcatttgacatgtttaaccatataaagggggttgtttacagttctgattgagaacttgaagcgatacaggatatgtagagtcggtgtgaggatatagagggggaaataagcttaggaaaatattagtgtttactacctgaataagaaatttccctggaaaataagtatggtgggtgagcaaggaatgcaataccacgatattattgctctgactttagagggagagtgaggagtgagctgcgggagtgtagcttagggatagagttcatggaagccctgggttcagttcccactgccaacacccagatgataggaattcagtaatttttctagtaggaaaacagtgacatctaaatttgaaaagtcaggaagaaatctttcttatatttttggttgtaaacctagcctttaatggctgagccatctctccagctcaagaagaaatatttctaaagaaattgctgtgtttagaaacatgaaataaatgcaaaaatattgaaaacttaattgcttctgtcgaaggaaaccagaagtggtgagattggtaaaatgcattgtaatggcattgtaatgctgctcgacttttcagcgaggcactgcttttacaagctgatttctttagatcagtatgaagttagttggtaaaatcaatgtttatttaaacattaaaccttgttgatctaatacctttattatactgctcttgtgtctgtcattcatttaatcagtttctggtttccactcatgttactaatacttggctccctccgctgtgatgagaaaatatattctaagaaacatgagtcagtcttatgctcatctcaacatagaggataatttagttactatctataaatagcctgcaaatcatcactactctctgaaagttataaaaggggacaataatccccatgcagaactgaggaactggagtaatgaaagtgtacagcactcccattatccttcagaggcaggatggaccaagagctggtcggattttgttgtaagtattgactcttgtcccaggagctttgtggcattaaaacttaactgactttttagaagtttcttctttttccctcctttaactaatagagattgtacaatagcttgtataccctattgtgtctacaccaggtatagtagggtatacctttaatcccagcacttgggagacagaagctggtgggttagtgtgagttcaaaactgggctacatagtgagagcctgtctcaaattgaagtctgtatttacccagccgccaccattcaaggtaaacatgaataaaatgtgtctttgcgttttatttgtatttaacatgcttctcaaggctgtgtcttaagtagacatgaactaaatttgtgtttgtatgtatgtatattgatttcattgtgggccagttcttttagcatctgtttgcatttggggtcttctgttttagagaaaaatacttaagtgctagaagaaaaccatatcttttatatttttattcaatatgtttaaaatactttagtggccataatagtacttgtttatatttatttctggaaatggtatgtaattgttttctctaaaacattcaaattattgaaaatgtgtatctaactcatagaaaacaagcccattggaattttcccacgacttggaatgcagacaattgtgctgtggtaaaatcaaggcagagacaacaatgtatgtgacctctaggaagaagggcttcatgaatttccagcgtcagcctagtagtgatgatcccgaagaaagcaggggttataatgttggagatttgggcaagtctcactttataggttaaaacattataattagattcgtaagccattcaattgatgtagaattattcatgccaccaaggatttgtaagtcaggaaatttgtgctagacactgtttattcaattacatatacatagtcatcttttaaatgagcaggccaacagtatacattactttcttcaaacatcagcctcttgaaggtgtatcatctgcatatttgagttgttattgtgccttgttccttagtagacactcttaactctgtagactgggatcctctagagattgttgaggcaggtagagcaatcctctgaagtcgatattataaatgtctttattcagtaatacttccagatccctcacatacatacctttctttcctatgatgactaccaaaatttacttactctgtgtgttaaaaccattgtgttgcttagagaaataggtattagcagcacccacccgccagcagttacaatggggatgaattgcagtcagaataccatgtagctcaactgtggacagtgtttatatattgttagtataaccctgaatgttgatttagccaagttattttcttatggtgtgtgtggggggggggtgtggtgagggtggttgtaggcttttgccattagaaaatgtgtatctaaagttaagacacaagaatcagctaaaagtggaaatgagtggttaagtgttaagacagtaagctaatgtttgctttgttgtagctttgtgtgtgtgtgtaatattattttgagattaatgaaaagagactgaagcacaaaatgtaaacatcctaaaacctaaattgttttcaaattagcagtggtcacttttctttttaaaaaatttatttttcatgtgtgggtgttttgcttgaaggccagaagagggtgttggatcccctggaactggagttacagatgattgtgaaccactgtgtaggttctgggaatcaaactcaggtcttctggaagagcaaccagtactcaatcactgagccatatccctagcccctaattaaaattttaatgcaaaccttagttgagtttcttcattataagcacattattgaaaaaaatgtgttttttgtctagttttttttttaagatttgtttattatgtttattagtgttctgccttcatgccaggattaataatatcctgtactggagactgcttaaacgttagagctaagcaatgctgttgatatgctcatgtcagaataagggtttagggtaactttccagtgtggattgtgtcagagaaaaagcagatttatgtgtgtgttattataaaaaggtcagccagacggtggtggcgcacaccttaatcccagggcttgggaggcagagacaggtgaatctcagtgagtttgaggccagcctggtctacagagagttccaggacagccaggagtacacagaaaccttgtgtagaaaaataaaacaagcaaataaacaaaaaacagggggtctagatgtgtattccaaaatcaactatagttatctataggcctgaaatttcactgatctataatttatttcttatttaacggggtttatttcaatccctcaaatgtttattcagctatagctatgatcattgtgttttgtgaactgtagcttgtgcacttaatgtcacatttttaagaaaagagaattgcttcgttatctgattaatataattaatcaatcaatatattgacttggcctttggagtggaggtttgtttgctactctctgctctcaaacattgtgttgattgagagctgtggctctggagagggtggttcatttgtataaaacatgaggcttctgtaaggaagcctgcctttgtgcaagtagtacccacagttctactttcatttattcaatttctaatttcaggcagctgcaagaacagcagcgacagaaggagctggagagggaaagaatggagagagaaagaatggagagggagaggttggagagagaacgactagagagagagaggctagagagagagcgcctggaacaagagcagctggagcgcgagcgcctggagcgggagcacatggagcggctggagcgcgagcgcgagcgcgagcgggagcggctggagcgggagcgcctggagcagctggagcgggagcaagccgagtgggagcgcgagcgcagactgtccaatgctggtaaggcgtctgcacacttggcggcctgcatctgagctgggcgaggctctgtgcaatcgtgaattgtgatgtttctcgtgtgcaaggcttggggataagtagtaccctgtgcagttaggataaatactcagcaattattgcttcactgtttcttttattgcttagaaactaaaagaaagctcttgggaatttttattctgtcattttaattcttcttgccaccctaaaattcagctatgaagtgtgaatgtgtttttatgcaaagatttttttttataatgacctaggaggatatttcccttgtgcaggtgcttaaaactatcacatactatatgtattgtactacatgcagcaagaagttagctcggttatagttatgtttctcaggaaaaattaaagtagatgaaaatagtctctcttaaaaataactggttatttaaccattttctggtattgtgaaaaataacaatctgatggaatttatcacgtgtcataaaagaggtttgtgatatggtaaattttaaggtgtttcgtacttgtcaaagaatttttaatctttctgagctacatcagaagcagtgtgggtacagtattggctagttggttaagttaattcattgcttttaattgcctgcttgtctggagttacagctgagaagatggaaatgtccacacataagcagagttgggtgttctttccctttgtagtaaacattttgccaggtttgaaacagctcgcttattctgctgtttgtaataatttcgatgatgttttagtggactaagtacgaaaagttaagtctattactatccttttcttataaaggacagagtattaatcttcatatttaaaagaacttatttcatcctctttcgggtttcaaaatgtttacaagttaaattttctccagtggagacaattatttgcctaattttctggtactaactatagtctacgtttatacattttgtctggttgctggttttgtggcttcactagctccctttttctctctcctttttatcctgtctttgcctgccgctgctttccaccttatgtgcagctccatcttcagacagctccctgtatagtgctccacctcctgagtattccagttgccagcctcctccagcacctcctccatcatatgctaacgtcatctcagctccagtgtcagacgccacacctgattacgctctagcgactgctttgccacctacttccacaccccccacaccaccactgcgacactcagcgacacgttttgcaacatctctaggttcagccttccaccctgttcttccccattacgctacagttcctcgtcctctgaacaaaaactctcgaccttcttctcctgtgaacacaccctcttctcagcctccagctgcgaagtcctgtgcctggtctacttccaatttctcgcccctccctccatctcctccgataatgattagtagcccccctggcaaagctactggcccaaggccagtcctcccggtttgtgtctcctctcctgtgccccaaatgcctccgtcaccaacagcacccaatgggctgctggactctgtaacatacccagtgtctccaccgcctacctcagggccagcagcgccacctccaccaccgccgccaccaccaccaccaccgccgccgccgctgcctcccctggcctcactctcacactgtggatcacaggcttctcctcctccaggcacccctcttgcctcaactccctcatccaagcccagtgttctcccttctccctctgcagctgcccctgcctctgtggagacccctctaaatcctgagctgggagactcctctgcttccgagccaggcttgcaggcagcctctcagccggccgagacgccaaccccgcagggtaaggcttcactcccactgcagactcctagtcacttcagagcagtgtatagcaacagtgactgcctagaagaatggatcagaggttttgataactgagcatctctgtgccacagtgtactacctgggttgtttagtttatcttaaaaaatgaagaattttttttatcctgaggcctttattgtatacagcaatttagtatgggagatatccatattaaacttaggtttttagatccattgcagtaagaattgtaggaggtactttctaatatttagggacccctatagtagtacatttattttaagcttcactaggaaaacttgaccagttcatgttccatgcagtaaataggagatctaaatactgtcttgaagacttggagagctagctgttcaatgagtaaatcatcccagagtttgcccagggcacttctgtcaggcatgtcccttttattcttagcatccagtattgagctctcattcggcattagacttgtagggtgggtagcatctgggctgttggcaggcttggtgtgtgcccccagaggattccacggtccaattgcaagtagtggtataaatgcaaacagggtcctcgaggtttccctcaaacacaagctgttccgcatggcggcagaagaggccatgtaagaaacagcaggtatggagaatgtgcataaagatggcctggttctgtgggaagacacaaggtggccctgctttctgctgtcggtttataagtagacaacgtagtggggatgctgaagacaaatccatgcttataggaacaacgttataatctagatttaaacataaccttataggaacaacactataatctagatttaaacataaccttgttaaaaataactttttgatgatatcagatttttctaaaaggtgaatcagattagaatatgtgtaatttaagctctgtgattgacatctgatcaaaaggcacaggcagcctgacaaggctaactgcctcctgcttggctcagaattcagtctgcagggtgggcagcttagcttcaacccttcgtttccctatatgtctgttcaagcctcagaagtggtagctactacccagtgtgcaaactcaacactgtatttacaaaaacaaaaattagcccttttaagcattaagtaaatgctcattaattttgtattttgatattaagtaaattcttgactttttttttttttgcaagatttgaatacttcttattccctgccttgagggctaaaacatctctctatatttaaattcttaattatttctcagttattttgaggttttgtctcatagttaattccttttatttcttctgtgattctcatttaggctatatgttgaatttacatgtagaatcactttaagatactaaaacccgagatccccttctctacagttttcatcttgtctatctgaaaacaaatccctttttgtcatcatagtgaagtatgtcatctcagcatctaagggtttacatgggttatcttggggatgttatctcaggcagtactaactgtgcgtgtgtgaacattgcatacttttctaaaataatacaagcatttgttttcaaatcccttggtgggggtgggggggtctcagtggttctgttattaaaggtcaaatattaaatagtttgtatatacactttgccttttgaagtctagtgtcttttgttaaaaactagtctagactttaagcattatgataaattaatttcttatgtgcagtgtctgagtcaatttagagtgtcattctatataatctgccctgaaactacaatggtttagctctgttgttgacggctgtcttaacttccttcctctcaggccttgtcttgggaccacctgcacctcccccacccccacccccacccctcccaccaggccttcttacccacacctcagcacttcctcctcccctggaccccctccaccacctccactgccatccactgggcctcctccaccgcctcccccaccccctcctcctcctgccccacccctccctgcgtctggatttttctctggacccgccgtgtccgaagacagtcgccctttaactggactggcagctgcaattgcgggagcaaagcttaggaaagtgtctcgggtaaatcgccaaactccatgacttttaaatgtgtgtcctattgtttctaagtgtctaaaacagtgaaattactgtgttacagtggtgtgaaccctgttactgactctattgattaaaaaccaacataatttaaaatttccgaaaagatgtaagggtagtgtagagtttctgtgacccctttatcgtatcgtctctagatttgagagttaataccggaccactatttgcctcttgttttctttgtgtgtgtctcctttaccacacactgtttccaatataaatgatttgagagtaagtaaaaaacaccatgttcttatttttttttatctcagtgtagatttggaggggggtagctaattattttttatggcttattttttttctagttcaagatcatttgttaaattttattgcaattctcttgttttaatctgtgatggatcttcagtctttattacattttaaaaaaacatagttattttttaaaattatctttgagtttggtttattacatttctacctcagtattgaattcagattatgtatttgggatgagggggaaaaataacatcaggattgtgtctttctcagtgtgtcatatggaaagtcaatgctgttttttcccccaatgttggtgattttctctttgatagaattcccattgaaatgtgaagtcgatgttattcactctgttggttcttcaaatttaaaaaaaaaaaatactctttttgaaatcaataatgatgtgttcctttgatttgaatatgttagcaggcattattatctacataggaaattattatgtgtgtgttctcattaaggtggaggatggctctttcccaagtggagggagtactgtgggtgtgaacttggcctcgtcgaaaacagatgctggtcgtgggaatggaccccttcctctagggggcagtggcttaatggaagaaatgagtgctctgctggccaggaggtgagagattttactaaggtggttatgttcagagtcaagaacactttgataattttgtcctcttcgctcttagaacaagagtagacagacaggcagggagacaaagataggtatgtgatataaaacttttaaattaatttgcctttccaggagaagaattgctgaaaaaggttcaacagtagaagcagaacaaaaagaagacagaagtgtaagtgaatataaaatctctgtaccttaagatgtaaaactcgagcccagtttattttaaaaaaaaaaaagaggcatgtacagattatttaatctgaactcaattcatttgtgcttgtttgcttatttcatttctacctataaaatattagaaatggcttgagtgttatgtatgaaattatagtctcattcttagcgaattgagttgaatatggggatttgtagggaaagtactgaagaattaacctataaagttaattctgttcttcatccacctttaaatgagtgaatggagtcttacaagttttctaatgttaggcttctcaatttgtttgtgataatgtaagattaaagaattatattaaatcaacagtttgtacatcacccttaggagccctttgtatattagctgtgccccttaggagtgtgcccttcatgtcctaccccacatttcagccaggtgaactaacttctcctgcctgttgtgtcgccttcaacgcagccataaccgttttccctgtgacatctggcctcctttccatagcgtgcctcaaatcatctcacctcaggttgctggcgttggctagttcaggctctcaggacttagcaaggaagagctttgtgaagacagtagggagaagactggaagtcagagaaagaagcagtgtgaggcagactgtgaggaaaacgagatagatgacagaaaaaaaaggagaggggagcttgtagccttagctgcagagagtagcacctacggtggtgtgatgttaactgactgtttctgtgcatttaggaagatgcagagcctgtaacttctaaggcctcgtcaacaagtacacctggtaagttcaggagaaaactccctaaatgctgatactgtccagttaacaaggctctttcctgtgtttggaccaagtgactgcttgctcaccacaaacattaaagtgctttatgtacatttgaaggcagtgatcttttttctcacaaatcaatgaaatgcacatgctgctaggtagcattataatatatctcaaaacattctcaagtgcggaaacaaactctcctttctctgcagccattgactacttttagctttttgtgtagtggttgggccacatggaattttcccagtcggtgttggtgtgtcagccggtgttgtcactgtgctggtcttgttcaggcagccatattgctgagaagtcctgcgatgttgtagcactgccggtcttggctccattcctcgacagccatgaggttcagcctgggtgggggtgtgtggacctggaaacccctagcaacccagcggcaataaagaccaaacacaggcaccttgtcatctttacagagctctcagttccatgttgtaaaattagagtctcttctttatctaccatctttttggctgtttcttaaccatgcttccatggccatgaggagaccacttctgtccttctcttctctctgcttgatggccccctaactccaccaacgcccggctctgttgcacacctttaaacccagcactcaggaggcagaggcaggcaaatctctgagtttgaggccagcctggtctacaaatcgagctccaagacagctggggaagacagagaaaccctgtcttcaaaaaccaaaataaaacaaaacaaaaatatcatataaaacacttaatgagccaaaaatgagtgacagattaaaaaatctcttaagcacaaaaactcataaggtgctaaatacgactgtcagggagggaataacatattgaatcacctgggctatctttggagagaatgatgttaacattgcattgtagagtgtttagctcagctaaaactaaaatgttagtatgttatgaacagagatatggtgttaaagttgagtaagaagaaactgaggaatgacaagttgacttcttacttgtctagaacttggctttaaggattcttgggagaatgtgtttgaaacatgttaaaattaaaaaaaaaaaaaaaaaaaaaaaaagctgttaggaagcacacgcctttaatcccagcactcgggaggcagaggcaggtacatctcagtgaatttgaggccagcctggtctatggagcaagtgccaggataggctccaaagctacacagagaaaccctgtctcgaaaaatggagggggcggggactattaggaaaagataggtagtaagtagatttaggctttatcttgcaagtatttgcatttgacatgtaagtcagctaaaactctttgggagcactttaaactggcgtttgtcagtcttgtcaatgtggagtgggggaagactgagttagggaaaccaatctgctggagccagtggagatccagtgtgtcttcacaaactgccagcagggacccagacctctgccttgtcctgaagcccacctgtgctgcttagaaaagagatccctaccccttctgcttcctcagagccgaacaacccatcctcacaaccagaggtccctttgaagattaacagggtagctggtggtggtggctgcagcacacacctctaatcccagcacttgggaggcagaggcaggcaggtctctgaattcgaggccagccctgttgacaggatagcccggactgtccctgtctcaaaaaaaaaaaacaaaaacaagagattaacagggtaaggttaactaagcatgataatttttacctgcactaggagcatttggcagactgaggcaggagaattgccacaagtttgagaccagcctggactatctatataatcccaggttaccttgaactgtagtgtgagactggaactcaaagaacaaaaaacaaaccagatgaacagaaagagattaatagggcttctccctaattgagaaagtaccacactcatcgcttaaggtagtgtttgtactgcatctaccaactttttaattgctttcatccttacacctgcatcttctttgatactcatgtcccagtggttctcaccctcccttcctggtgtgtcttccatcctctgtgacttgggttagtgtgtagaatgtagttcatattccgtccatcctggctccattctgttttttgatgttcccttactaactctggaagctgccgttcatgtgctcaccaacaatgccttagctactcccagagatgaggaagaattaaatgatgaagtaaaggaaggtcatggcaacttaggatcttccctagatagctctgaggaagcagttcagagccccaagctgggctccaggggagtttggatttagttttgcatacagtttgaagagactataaaagcttcctcctgagtggagacgtgcagaagccacttaaggggtggccacatagaacatgaaacagtttcttatataaaatacagtgtaagcgtgactcagagacagagttgatttgagcgtgactcagatgctctccctctgacagcttcacttttgattttattaagtcatctagtcagaccactgacacagcatcagatagtcgaccacattggaaaatcacagttctaagcctgtgtctatacactgtctcctgtttccctagaactgactgattctgaaatttatttggagctgttttttccccccgagagctatttgaatttatgtgaaatgttgaatagaaacacaccacagattgtactttttatttactactggacaaaagtttagtacattggaatttattggattctagtgtaaactatgctaattggttaaggcatccttttatcatgcttattatcactatcatttggattgtttagattttatataatgtaaggggttttaagaaagcatactcactttttttctttttcttttgatttgagttttttagacaaggtgtcactatgtagtcttggctacatggaactcactgtgaagaccaggctagcctcattcagctcttcctgcctctaccttctgaaatcgtacatgttagagtccctactgttcaaaatttaaatgttgtataagtattacttctgtgtacatagaatgatagttctttcatgtcttgttttgcaatgattctggaaggctttgaggtgtgtgtgtgtttaataacacttgtttcttatttttgaagaaccaaccagaaaaccctgggaaagaacaaacacgatgaatggcagtaagtcacctgtcatctccaggtattgattttttttctacattttatattacatgtatctaaaaagaagttaatacctttttatcatagaaaaattttagttgtgcaaaggaaaacataaaagcacctatgatctatatactgtaaaaccactgaattcatatttttgctactcctgactatctgataaattctgctggcatatttcttaatcagatgtatagatactttaggatagtttcatcctttttaacttgtttgttttttaaaaaattcaaattaaaagaagaaacatggagcaaattttaaaatgcaactatcacccagtcacatgtcttttttctttgcatccatgttttcttctctcttaatagtgtaaagaaacttgtaagtaaatggtgttttcacctaaatactttgatagtctcccaaagagctaggacatctccaacacaaccaaaatagaatcactgccccacatcaattaaacattgaacaataaggaaaatctgatatagcactgaccaataatgacccaactagtctctacatagttttcaaaataaaattttagaagagaactatgttttatattgaaattcagctaaagattataaagaatgtaaaagagcaaaaatgaagtacaaatttgctgtatgtccatcaaaaccgggctggagaggtggcttagcggttgctctagtggacccaggttcaagtcctaccccacatagtagctaacaactgcctgtaacttcacttcctgggggtccagtgctgttttctggcttgtgaaggcacggcatgtacatgtagacaaatgtgttggcaaaacactcatttgaatgtaattcaaaaaataaataatttgggtgtggtgtgcatattttttaatcccaatgttcaccaggcagaggcaagcagatctctgagatcgaggccaacctagagtacatattaagttctgggccaggtaaaactacacagttagaccctgtctcaaaaaaatcaataagtaataaaacatcccaaaatttttatcatagttaagttagaaatgatagacttgctgaccagtcaagagaccctgcttccaaaaaacagtggagaaaaaccacctgtcatcctctctttgcttgtgcacaagcacgcagttttcagaatgcttacctaatatgcacaaaggcctgagctcaatccccagcactgcttgaactgaaacatggtagcaatgtctgtaatcccagcactgaggggcagggctgtgggtgagacagaaaggtggtcagggtcatcctcatctacttactaaatctggggccagcttggcctacctgaaatgctgtctccaaaaacaaagaaaggaaagatagtgtccatagacagtactgactgagttctgtgagttaaccacaggcaggagtgttgtggtaaaaatctcctggttgtattcatgatgggagaacatgttctttatgtgtctgtgtataattagttttgtctgcatgggctacagatattttttagtctattgctttgatattcactgaatagagatgtctttgcttgggttttgatccttggtcagtaggtagctacagcgtacaaaagcagccattgtgtcatgtaaattgatatcaaaatacccttttaaatttggtaaaaataaatattttaaggataattaacaacttttatttttgttttgcttgctataactaaaagcctataaatcagtagcatcatgggaattatcttttgaagttctactgtataccctttaaatggtttttccccttcatagacgggattctccaaggaaaaatcagattgtttttgacaacaggtcctatgattcattacacaggtatcatcctgctgtgactttgtgatttcagacttttcagtaacatgtccagggtagggctgagctttttctacctggattggtaatcaccacaagggagactttgggaggattgaggtttcttttttgtaactgtagtttgaattgcttgatagttggattcagataaacacaaatgataagcatcagaagtactagaatgaaaagtcgtatcattttacagtgttggtcgatttagcattttcctttaaagcggttttcttcatgattctgtggtgaggcttttaaagaatggaactgcagtcctgtgctgcttttgctaggacagacgacagtattgtagctatagatgaagctgctccctccatgtgctgagtgagtgtctaacgatttggtacctagcatcctgagcacattgtttctagatgagccctaagattttttttttaatgaaaaaagcaaaaaaaggccaaaaaacccaaacctcagaatattaaacatacaggtcactaatcatgtcctgtgcacagtcttcagcactgccatccctccaccaccagtatcaatcgtctgtttctcttgattgaaaaaaaggcagcccggcgttggtggcgcacgcctttaatcccagcactcaggaggcagaggcaggtggatctctgtgagtttgagaccagcctggtctacaagagctagttccaggacaaccttcaaagccacagattgtttcgaaaaaacaaaaaaaagaaaaggaaaaaaaagcaacaattttaaaaagtctgtaaatgcttcttagcagtttatagaatttatttgatagaataggaagttaaatattgcagtatagtaattttataggcagatgtctaggtaacattttcctaaaattaagggaaaaatgtatatttaaacatctaataatccctcagatggtttgttatcagttcataataaaaatccataatttaaaagcaacagatataaagaggggcaagatattatatgcctgtcgtcttggcactcaggatgctgaggcagagcgatgaattaagggtatcctggattatatagtgagacttgcctcagataaatgaaggaatacataaacactgaagtatatgcattttattagaaatatattaataaccaggcatgttaatgcatgcctttaatcccagcacttgggaggcagtggcaggtgagtctctgaattcgaggcctggtctacaaagcaacttggaggacaattggggcttattacacagagaaaccctgtcttgaaaataaacaaaggaaaagaaaaacttcagtatgtgccaggcacaatggcacacacctttaatcctggaaccctggagacagagacaggagggtctgtggaggccagcctgagcaacatagagcagtgtttctcaacctgtggtttactacccctctgggggtcaaacaatccttccacaggggtcaaatatcagatatcttgcatatcatatatttacattacggttcagaacagtagcaaaactacagttaattaaaaagcagtgaaattaattttacggtgaggatcactgcaacatgaggaactgtattaaagggtcacagcatcaggaaggttgagaaccagtgatgaagagagtttcagtttcaggatgtccagggctatatagagagaccctgtctcaagaaaaaaagaaaagaaatatatcattgttacatacatccatttttttttaaatgtacatcatgtgttcagtagtgaatgaattaaataatggatagagaggatatctgtgtcagtaagtagttctgtaactggctctggtcattcttatttgctaaaattacttttatgctgctggcaattaaaatatttggcagatttattttgtcaaccagctacttttccatgaatgttcatattacagtccagcctttttatttgtttctttgaagtaggctaattgttcagaagaaaaggtttattaggaaaatctgctagaacatagagaaaaacagtgcctaaaaccaaaatcctctaagtcacctgctacttccatacttagcaccagattattgttccttttttaaaaaaaagtggtgattactcctttccttcagtatgaaaagttcccccccttgagttaattcttgtggtggtggtggtggtggtggtggtggtggtggtggtggtggtggtggtggtggtggtggtggtggtggtggtggtggtggattgcatgttagcatgaattaaatttttttaagttgcatgtttgcacagttgtttattagttaacattttaaattatttaacaaatgcagatatgtttataaagtatagcatatttctcagctaagtagattatacctgtttgttggaatttcagaaatagccattatatatcttaggaaaaagtaacctaattgaccttaaatggaagcaataaaggcagattaattaataatttatttaattctggaaagcagagataaataaccagggtatataaaatgcagtgtgccaaccctcaagaatatttactatacctgactttgcccagaatactggatattttgctgtgggtcttagatcttaatactttagaattcactagggtcttcaacaaagaaaggtgtatcttcatgagaggagaagcagttctgtatataaatcctcagtacttattaaacaaagtttctggaagttgctgcttaagcagatacccaataagttaaaattgggcttcttgtttttgttttgtaatgagatttttaagcaataatatgttttgatattgaagcaaattattttatctctaggaacaatgcctttgggtttggtgttaacatcttaagaattatgaaatacaactttatagcaagttgcatgtgttgggtcttcattcagaaaatttgctaacgctggtacactgcaaaattgaaaattgtttttactaatggtttgtagaatggttactgttctaaaccagaaaatgaagacgtgaacaactgaagctccaggtgccctctgaggagtttctcttatttgcaggattggagagggagccatgactgatttattttgtgttggaacttaatatttgaaatatgcctaatccataacacttattttactgtgtaaaaattttaatgaatgctaaactttggaagtgtagttgtaattgacaggttctgtcttagaatttccaaggttttattttgctattttctttcttccttttcaaaacaaagtagatttatgggctttgttggaagctagtaccaactggatgtgggagtgtgcttctaatagtcatttttcagcatttttgtttaaatgctttaaaaggaagcaaatagacaacgaaattaggtttactaaattattttttcctacaaaccgagtctcagaacttataaactggcctatgttaaaataaaatattgatgataatcagagctttccctttattcatttacttgacatttaatacataatatcaaatttcagaaacaccaaacatgactgcattatgcaggccttggaaattttagctgatcactttgccatgtcaatggtcagcatgccatgtgttacctcgtctcctgttcctttctaggagcttttccatattgtcaccattttctacttttttaaatagatgattaaattgagaaaagcaaaaacattttctgcttcctgttctaatcagtcctacagttttgacaattaactttttagtaaaatgtgtttaggaaatgaatttaaatttggcatcggggtggcaaattcacagttacttacaaccttattagatgttgtaaatataatttgtcctggaaatttcttttgtgcagacccaaatctacaccttcatcacagcccagtgccaatggagtccagacagaaggacttgactatgacagactgaagcaggtgggtactcggtgtagcttccttagtctttcttgtttaaagggggcaggggccttgcacacacatattctacatggatcctggggtgctataagagatcacacagttacagatattttagacaaattaaagtggctgcatttgtccctgtgagcatctcaattcctttctggttcagtgagctccctttaagttgcagtagcagtgaaggggacatggcgtggtaatgtaatataaagcttcgatgtaaggacaaggcttgcaattacagtaacagtaggcttccacctttctcttaccatattggtaaaaatagaccaaacaaatctgttgatttggcaagactgtgtgggaaatggacattctttgcctagttaggatttctaaggatatattgttctaaaaacaaatatccaacttttgactccaccagttttatttgaagaggtttatgaaaattgattagtgcaaaagtaaaggaattttaacaagatggtagtcatcagcctcatttgtacacgaaaagtttggggggggtgttatttttggtttttcaagatgggtttctctgcattttttgaggctgtcctggaactagctcttgtagaccaggctggtctcaaactcacagagatccacctggctctgcctcccaagtgctgggattaaaggcatgcgccaccaccacccagccgaaaagctttttctttaatgaactttaagaggcaatttaaaattttcccgaagtatactatataacacataatttaagaggaactgattccttccaaaaatagctgttgtttttctcctatgaaaattgtggctctttttcattgttcttttaatttttgtctataattcttgatggaagcacagagcatagtttaaatacaaacatacatctatatacatgtacatacatacacacataaaatggcagccacatgaaaagtgaacgggtgatgctggagacatggctcactagttaggaacatgagtcccagctctgcctctggatacccacccacatgttctcttacaatcgtacagcttcagaggatctgaatgccctattttggcctgtttggcatcaggcacatgtggtacacctatacatacatgcaggcaaaatactcagacatgaaaagtaaaagaaataaatctgtttaaaataaacagaaataatttcaatattttatttaacctaagtatattaaaaaatgaattcagtatatacacaatgttttgacattttaatgaatttgttttgttaaatttttcatttaatggattatttcttctctcagagcccagaaaaggggagggggttgtgagcagccatttgagttggaaccaaacctggatcctctgcaagagcgagtccccacattattttcttaatatttggtctgaaatctggaacatggtttacacttacagtccatcttttttcagactgccttcattgtaagagctcagcagctgtgtgtggctggtgcctgctctcttgggtacttgaagtaggacttggcagctgtgaggagtcctaagaaattgccatacttttgtttgtttgttagtttgtttgtttgttttttcgagacagggtttttttgtgtagctttggagcctatcctggcactcgctctggagaccaggctggccttgaacttacagagatctgcctgcctctacctctgcctcccgagtgctgggattaaaggcgtgcaccaccaacacccagctttttttttttttagatttatttatttattatgtacagtgttctgtctacacatatccctgcagaccagaagagggcaccagacctcattacagatggttgtgagccaccaagtggttgctgggaattgaactcaggacctctggaagagcagccatacttattgttgtgacaaatctgtcaagagcagattgtccagtgacatcttctgtgaaactaacctgcacatcacctcttagatggctgctagagggtcagtccccaaagttgtctcaattctatgtctctgaataacagaacggtctgtccatttcatgtcttgttaggccagaagaagcaaatttgggttaggtagaaatagttaaacaatttactaaggcttgccttctaagaaatagaattgaaagtgtggaagcaggccatgtggtggagggaccctggggggatggtgttccctgttgagtaagcacaagggtttgggtttgacccctggacacatgcgaacaagccaagcatgttgatgagttccaggccactaaggcattgtttcacaaagggggacaaggacactgggacagatggttatcaacctgtgcttgtagaataatacccaatactgttctctggtcatgcacatagatacaaaagagctgtatttcatgatggtcttaaaagttttatcagaacaagaatcttcttagctgtccttttatctgtttgtttcctggtgctttctcttgatacttcaggacattttagaagaaatgagaaaagaactagcgaagctgaaggaggagcttattgatggtaagtacctggcatgctggcccctctcacactcttcagagtggctcagctgtgcttagtttgttgggaaggcgctgtcctcttaggatgtaaattatttgtaaaaatgaagataaacaaggtttctaagtgtcaagtgtagtatttggtggaaaccaatcaggcatatttttctctaagactcctctcctcatccattccactgtacactccttgttttggagcccacaggaagaactagagtctttgtcttgtatacacaagggagagggtaggtaaatataatcacacatgattagaatctctgtggtattaaagatctataaatgaagacagagtttgaatacaaacctttagatttctcaggaacacatcattcatctatcttccccatgtattgacattggaaaccatttcttccctgttacagcaatcaggcaggagttgagcaagccgaacactgcatagagaagcaaactgaggagagacaagacttgaatctggagaaaaacaaaaattcctacaaacaactcttaacaaccccctacgatttttaagctgtaagaagaaaatggacacacagtcaggagggaaaaagcaccaacctcagaaagccttcagacacagcgactctggcaatcagccactccctccctcccggtggtgtgctgctcttgacctgacctttaccccaggatgaagaactatgtctgagttccctagcagtactaaacccgccaggcaagaaatattttcatgtctagatgaaactgcacgttttccacaacccattgctaaaataaagaagaaaaaggcttaggaggttttttcagagggcgctaatgatgaagaatttagcaagttcggctgttgcattgtaaacgtttctctcaggtttgtcttcctgtcatttgatattccgtgaatagctaagatcataaaatatggaacagatggaattgtttgtgctttcaaagggtggtatttataagaaaggtcctaaaatgtttagtcccatttgaggaattttagaatgataggaagtctttcgggttagccttcatgcaattttgtagtttaaaacaaaatccgtccggaatttaaagatttagatgccttcctaaattgttacaatgctttaccaaatctatgacttctacataacaaacagttgtcaaatgtaaaccattctattatagatttaccgtaggttttcaaccttttttagacttatgcatgcggacatttttataatgtaattacaatcaccacaaagttagcttttttaattacagacagtaatgcatgtcacactaatgtgtagtggccttctcaaggcctagtcccagggaaaccattttgtagaatacagggaagagggaggaaggggaggaataatttttttatttaaagttaattctgcactatcttttttcccctcaattatctgcatgagttataatgagaaatattttgtgactttaatcggtaaacatgttaacaaaaccaagtacttaacctcttacaccatgtcttcagctgtttgtattttaaccagcaatctcaatggtctgaagcatgactctgagcttcccatgaatcacacatctcactgtggaactctgaaagtttggtcacagaattttgttgttactatcactcggtccctgcagtgctgcaggtgtgtgggtacatgctcctgactgtgaagctgctcttgacctttgttgtactaaaatacgagaaatatcaatggtggcagcaattagggtcacagaaatcgccagataaagggacaccaatggagagttctgcagttttcttttaataaaactgaagtaagatttaggtggtaggaagagtctgatactgttagaccctgagtgggtgttttgtgtgtgtgtgtgtgcatgagagtgtgcgtgtgcaagcgtgtatgcatgatggttgtgtcccacccctttatgttataattggcaagattaaaataaagaagaaatcctaatgttagctttttggaaaatctaggaaaacagaaattctccagtctctccatcatgatttacgcttgagttattaatgtgccatacttgctttggaatctttggttatcaaaacttttacttaaaaaaaaaaaaaaagaaatcactttcatttgctttctggatttcatacatcttagatgtaaaacaaagcttgatgccagcattgttttctaaacactgtaatttgcagtcattacactacagagaagtcgaatgaggatttttttccttgttaacagtttgtttctgtagaaacttcatttttagattaaactgtgagggatgagctatcatagttcaaatatacagctctttttctacgcattattcattgtcatgcagtagtagtaaaggcgttacagatatggctggcttctgagatgttctctaagggaaataggcttttcatttactgttaaacttttcattatgcagctccttcgataatgtagatgtgtgcatcccttacagatctgatcaaaaatcacttttgattttgttgctgaagttaaatatcgttagtaggtagagtactgggtataagtggtccaaagtgaggcagaagaatactaaagtcaaatgctaagtcctaaaagaaactggtttatgcactaaacgttttgtgccttggtctaatacttaacacaatgtctgtgtaaaatgataaaaaaaaaaaagaaccagtgttgattcatgctatatcgctatatcctccataatattgcattatccacatggctaaacgtgttccttcctagaagcttattgaactattctatgcgttcattgtcacacacgacagtcttgccattattagagatttcggtgattaaaatgggaaacagaagcttaggttgttttcccacaaccgtcccttggaaccatatgatgatgatgggtttttgcttttgtgtgttgaatgtcttcagctgagtgcagtttagggatgctttctagctacaggaaagcactgctctcctcaacactgtgatctgccctgcgacaaccctgtacaacacactctgtgaatggctagcaagtcaatagcaaacaaactgaatgtataacccttagtgctggtgctgaagtctctaaagaatagttgtcatgacctcagagttcatttaaaaatttacaagcataacgtgtccatcagaactaaagatgaaacactgatgaatgtagaatcctcatgctgcaggtgtgtttcctatttaggtttttcagttctctgctgtttttaccataactgtttgatttaaatttcctacacactaacttcatttgtgcgattgaaataaaatctcagtatatacatctttcttgtttgtgacacttagatgatcttctgaaatagtgtgtcaattccaaaccaagtcatactgggtgtcaaatgagcacctaatgcagcccagggcttcactgttacagtttacacgtcacgtcactgttccttaagattgcatcaaagtcaggaatagtaaataacataaagggaatatgtaacaatctatctgcctcttattttgaagtaagtgctgtgtgttccttttatctcattttcttaccacaccttgacagtgttttttatagtcaagatggtgaaaaatgtttcactccattttttgttctataacatgatcatatatttcacctcttacacagttcatgtttgtttttatgatttgcagattaaaagatattgccaagtaattaactttaaatgtatagtctgtaccatgtggtgttttctacatcacgctcatctctttaaattggctgaatgtatataagcctcagcatttttatcatctattataaagtatctttcctgagttccagtttgaaactgtaatttcttcattagaagtacaataatcttgtatattttttcttcctttaccagaccccagcctttatcctaagctgccctccatctttgtggactacatgttcctggcattagtttgcatttgctgctattacgtagcccagtgttgtgaaaacaccagctgatttttcttttgtgtcctaactcatattcctgctttatctacacattagtcactcaagaatgaattaagcagcagatgctaagcttttcaatttgcctggctaaaattactgtctcataagttatgttcatcttttcagggttgctatgaagaactcatgctgttaggcacagggcctatgaaggtgcgctgtaggacccatattttcttcatgtggccatgaaaattgtttaagccatttaccatgctctctattcctgtgaacatacctgtaatccagcattctggagacagaaacaggaggagtgtgagtttgaggtcaggctgggctgcatagagagactttgtctaaaacaaattcataaagtcctgtgggttgtagcatgaaaatgatgtcatgtaaggcagagtgcaaagggagtgcctgtgccttcatcaagctgtaagaaaacccactttcctaaagacattgtggttttcacttccaaactctgacttgttcctggtagtgccagttttgtttctaatagaattggtacttgatcatctccccagagctctgagaaatagaaaaggatcctaagagtttactgaaattgatacctctgacatttttggtgagagccatttactgttttataagttcagtcctgtattttaaggagtctgactgcacaattactctggtcagtactttagatgaagatcatggagaacatgtacttacaggaattgttttttgttgaacatacatccttttgaccaagaagcaaaaattagtgatctctcaagaaaagccatttatttatgccgaatattcttggaggtagggggctttctctgtgatacaggctttctctattcccaacaccaaaaggctgtggattaaatctcattccctcgtgtttaccttgatggtgttttgaagtaccaaggttctttttaacatgtctttgtgtgagtgaccgtgcacatgtatgtgcatgtagagaccggcgttgaacctcgccacccatttcctttgagacagggtctctcataggcctacagctcacaaattcagttgcctggctggctgtgagtcctgggcatcctcctgtctctgcctcctagtgctgggcttactaatttgtaccaccgtacccagcgtttgtacatgggttctaggatctggctctggcccttgtgctagcttgggaagcacttttccaatttagcttagtttctaatcccaccctcttgttttctttctattttaatgttggaaaagggaaacattcaaaattttaaaatctaaaggttgtttagttgattagaaaagatggtatagtaagtttatagagaaacagacacatagataacctgttggtagaatactaatgaatagtcaactcacacaaggaaaattggactttttgataaaaatgaatttgaaaacttgaaatatgaactgtgttaatttgtaaagccacagtcactgaagggtaagaagaatttgctacagtcgttgatcgtatctgttgaaatctaaagatgtgggtgcaggtgaggagcagggggttgggaagaagcttttcccttcgtaagagacgctgtctgttgtgtcagctcactaaaatgtcagagctatgcactccagactccctgtaggtctcccatgcttgcttattaacgtatagactagataatagccgaagtctcagttaagtgtttggaccagaggtctatcccggtaccctggtttgcagctcaccaggtactgcaatagcacacagcctttagaagcttctggtgcaggaccctaggattcctgaataatggaagaccttggtcaggagcccaagtgagaactgagaggtagcagaacagatgactgacttacagtaggaaactcaagtgtaccactgagctcatcactaaattcagccttttctaaacataaattcagctgcaagataatagggctttctgttttaataacaaatagaaatgctcatgtgttcattaaagaactattggtaagtgacaatctctgtttactgttcagtgaatctggtttaactgttttccttttgactccaggaagtagataatagactccttaaaaaaaaacgttgccagttgaattcagggtggttcttccaagtaggtttagaatatatacacaggcaggccagtcagcgcaaaggaaatggtactccaacgaaaagacatgtgcttattatattgtagcactgaaaaaaaaatgaaaatgtagtctcttgtaatcctgaagtaaatgtgacacagaaacctttttttaaatttggtacctaaaagcatctgaaattcagtgttctttagtcagcttatctacacggttttttcgatgcttcgtatggtgttctgtgaaaggcttcaaagaatttctgttttgatgattttcagcttgttctcagtgagatgtaccagcagaagattgtcactccactgccagggtgaactttgatgcagacatgttttggcatttggtattctaacttgtggagtttcccccaaatattttcaccctcaagtctgaggcctgtctgccctaggggattgtcttacaccgttataatcatagccctacctgatgccaaagtcacccagcctccattgtgtatctggagaaatccgaactgagctggcttagccctttaaccggcattgcacagtgcctgggagaactatctcagaaatggggaaggcattgatattttaaagaaaaccatgttaaaaaatctagatatagtttctagtttcccctgggtggggatggggcaatttcagaagtttgtttacttatcctagacacctttcacttgctgacgatgttcgggcacatgtggtccctgtgagacaggcactactctcaggtgtgtgctgtatttccatgctctgctttgctgtgactatgaacgctgaggcaggtgttgagttgggaccccatgtgccatattgcttgtctgtcaggttccttctacctctgagatttaattgagtttcttcatttacctatcctctgtagttgtggttggtttgttatttgacccaagaaactggattttttttttcctatgcctgtggatgttttgcctgcatgtatatctgtgcaccacatatggtgcctttggaggtcaaaagagggcatccgatctcctggaatctcctggagttacagacagttgtgagctacccttttgatgctggggcttcaaaaaggttaacttctgagccatctcttcaaccctctgctctcatcttaaagagcagccttcgaatgtttaaaaatactagattatcttcagtgaaaaacacacatccaatttatgaataaggaagtgtcgatagatggctatattgaggtcagaagtgttctgttaggcattggtgattgttggtccattctgcatcatttgtgtgctttcataagctgaaacactggggacagcttggtggcttcagtagaggaatatgccatcagaaagaccagtgttctttactgatgtcatggggtggctgtcagtggcagaaagctcttgtgtgctcttctcatgctttgtgacctgtttctgagctagctggctacttagctgggaggctggcagcctagccctccttttttcctggagggaacgtacctcagcagtgcttgtgaatgtttgtgtcctgtgagccagctgtgtcagcttgaaacaaaagaatgacactacacttccctctccgctctttttattatgtaaagtacattccttcctagcttcttgttttggggctttacagaaattacaggccaggtgcccccttgacactgtttaagggttctgatctcttgcttgctttttaagagaggtgactgaagtgtggcatcttgtcttcctgtggcgcttctgctctgattcttggtttatgtgttggcattcattcctcagtggcaagacttgcgtttcctgatgtatgtatttggtgggaagggtcgagttactgtcatacgtgagagcaagttagggtagagttttcttagttctgtcttgagacatctgtggtcggtaggaagcatctctgtagtacatgtttataatatgggagagcttttgaggaagcctttctgcggtctgtaatctaaacacccgctgaatctctagtgtcccccattggcagataaaaggctgctgcatctgtgcgttatccagaacagaaagaacttcagaaagttgcctgggggttccagctggctctcggggcctgacccacgagagaaggtttaggtcctctgcctgatgcaagccagctgcttcctttgtgctttctggtttttgttttgggcttttgtttgtttgtttgtttttttttttttttttttttttttttttgaggcagggtttctctgtggctttggaggctgtcctggaactagctcttgtagaccgggctggtctcgaactcagagatccgcctgcctctgcctcccaagtgctgggattaaaggcttgcaccaccaccaccgcccagccctttgtgctttctggtaagcctctgggagtcagtgagtgggcccaagtgtagcgtgaaagccacttctggtgttgtttttctttctttcccaccccccttcccttggggagttagggagtctttttggctaaagaaccagatttagatgcttacatgccttttccttctcagacctcaagttaataaaccaaaaacataactagaacagcacagtggacgaaaatgtaaggggcagtcttagagatgaggtggacaatcagagcctgtgacttttcttatagaacacactgagcttctggtcttatgtcttcttgctttgctgcaaatgttagaaataggcacttgtccttaaaagatggccagagccgttccccttgataaacgatgataagcatttgcagcctgtgaatggggacttttctaatctaaagtcatgtgtggaggcagcatgactgcagaagttaagtggacaccttgatggaagagttttaattctaaatcatttgctagctggaaccttgtgtgtcttacctcagtgaatcatgtggattataggccttgctgaaattcaggagaaatgaaactggccatcacttactgtaaattctatagcttactgtaagacttggcttgattgactgaaaatgttcgaaagtctgtatgaaacatgatttcatcatcaggaaacaccatcatccaagcttggcacgtgctttaagaaggggaagtagaagagagggtaagaacacaagatggttggcttggtgggactaggcagcacctgagtttggcaccaaagttaccagtgatttaatgtggaggaccacttttgatccaccctaggaagacttgccagaaagtagcagttcctgctacacattacagtgccttccaataatgttctgtgtgaattgcatgcaatttcatgtaaccctgaagtgtaacatgtatgtgcatgacctgtccagaatgtgcaaagctaggactcagcagaaagggccgagccccattgctgacgggtcaacaggctgccggagttggacttgtgacttttggctttcagccttggaccccagggtttgcactaatggctttgtcatccaatcagatctgtctccccttcggcttcctctcctactttgcagctttgctgattttaactgcttcattcttctgcttcttggtatctttcttttgaaataaaaagacacaatacctaattaaaaagagatttgtattcattttgccagttgctctttgtttttacctattatgtcacatacaaaagagttttgtgtcccatttccatgattgtgattcagaaattgttctacacttagttcttaatctgataatggctcgcccacccttctgcactcctaacagtgttgatggaaacctggtgatatattcatttagtgcaaattatggggcctaaatgtaaataaatggcttcagtgggaaaaaaggtccaagcacctttctatgaaaataactgtatttctttccttatttaccaacctgatttctttgctgggagaaaattcttaattcagctcaaaaggaggaaagtttgtcttgactgcggtctcagtcagcagtcacgtgaccctttgctttggtcttgtgcatcatggcagaggggggctgctatcaccttggagggacacacactgcacaacctaactttcactaggccccaagtccccaaacaaagcctttgtaggggcactccaggtccaaactgacgaggagcactcctgaaggagcacccctgcacacagcgtggggactaagagttcgctttgtccctatcagcagtagtggccctcagcttttgcactttttctttctggactaaatccccatcatcacacaagaagaagcgaatatccagtaagtaatacacttgctgtcccatggctgctacagaggaaggcagtatgcttaaagtgggcatgtgaaccaagctatggagctttttcttttactgtggagagttggagtctttagaaatcagcctgtcatggtttctgtgattgcagtgtgctaaggagtacctgtctggggatgactgctgcagacaacccagtctggcaggacaggatcacagttgttgagatggcttcacttattctcagcccccttggggagtgtgtgtgtaactcagaccatgattgtggtgatatctttcttacacaaataaagcctgactaggggtcagagaatggagcttgtcactaggtaaccatagaggtctggaggtctgtacagacagacaggaagtgatgtagctgggcagaaacaggatataagcaggagaaacaggaaatcgctctctgctgcgacgcttaggaagtaaggtggcggtagctgtggcttgctcccttctctctgatctctcaacatttccctatatatctgactctggccttttattatctagaccagttaagaactccttttacatatgatcctccttcctcagcctcccaagtgctgataggtacctgccatacccagcttgaagatctctcatcctgagaactggagagatggctccgcagcgaaagggtacccagggtgagttcccagtgcctacatggtggcttacaaatatctgtaactccagttccggggatccgaccccctcttcttagctccaccagcatcaggcacatacatggtgcatgtacatacacgcaagcaaaatgcttatgaaattaagaaaccaaaggaaaaatggacatcactccaggtgtggcattgataaggtaattggatggacgttgctataagtcacacaatacacacagttgagttttaaagccaggaagctccgtttgtgacatgagacaatattagcttttcatagctctgcccctgagtctagaacctttgggatctaacctaagagatttcaccctgctgggactctgggaaagatatgtccccactgacaggagttttcagccagaacttccacaagtgggtgagacttctcaccattgtgttttggccctctttcagttggaataaaacagaaaactggctgcacacagctcactaaatgtatgcgtaaccagcacacaggtaaagaaagatccttgctgggactatgggagccccctcatgttctttccatagcttacagccaccataacctctcttggctcctccacacttagctgtctcttgtgcttgacatagatggaattgtgccttttggtgcttggcatctctcaatattgtacgtgagactcatccataacgcatagttgtgggtggtcccttctcagtgtgatatagtagttcccagcttggggctattatgagcagtgccactatgaatattccagcatgtgtggcgaacagatgggtgcctttcttctgggtttgtaactaggaatagccatggtgggccacaacagatggccatgtcagctcagcaggcacctcctcacttgtagacactatggcggtagccacctaggagcacatcagaggggtctctgagcctcctattgttggtctgatgtcagctcagcaaacatcaagtgagaaccaaacctgagcacaccactaaccgaattcttggttttcctgaaacagaagcaagaaactcctttaccaagaatttcattcattactacaggtaatgaaaggaattacctttcaagatacaactcccctacccccagtgaggtgtttattgcattttaagtcatcacttagcacctgcaggattacagaacagtttctcctttccggtgggtggatgccatgaggttgccactctagaaaagaggtgaggtgtttacccaatagtcacttttttttctctgaaagatattctagaccagtggttctcaaccttcctaatgtttcgaccctttaatacagttcctcatgtgatgaccccaaccataaaattattttcattgttactttgtaactgtagtttgctactgttatgaaaagtaatgtaaataatctgttttcccatggtcttgggtgacccctgtgaaaggattgtttgatcccagggggctgtgagctgctggtctagatttgaggaggtgattctatagtccaaggggtttttttagcacaaagtggaacattagtctgtggtgtagagttgacattttttaaacagaattatatatatattatctgagaactgttcaaaatcctaatctctggtggggttttttgtttgttttcattgaatctcacacactgggcttgatcactggcatctggcatggatttgagcaacagaaggacctgcaagtgaggtcttctcccatgaagccttttctcctaatgagtcactaatggcacagcccctctactcttccatgcaggctggtgatgaacacaaagacccaaatagtctcgtgactgctagcaggaggctaggagggtggaaagtgcggtggagtcgcttctagaatattggagccagaccacagactctgaactcagtgagaaagatgagtgtgccagagcccacagatctctccaagaaagagcccaacaaccatggaaaccatcagctctagctccggtgtttaaagaaggcttggaagagccagcccttaaccacagcaccttggttaaggaaggtctaagaatggaaaggttgtggagtgatgaattcagcctggagcaggtcctttatattagtaaataatcgagaaggtctttttaccgaaggcctcttcccgtgttgaacctggttacatgcgagaaccttaacactcggggaagaaaacgatgttcaagggtcaccggccaggtcctggtcatttttcactcacacacacttttttttttttttttttttttgctttttgcctgaaattgtaaggtgtggggtggggaagcaaagccttgattgctttttttaaaagtatccagtagctggagaaatggctcagtgattaagagcgtttgttcttgtggaggatcagaggtctggtcctagcgtacaggtggtggctcacagccatctgtaactagtcctgggggctaggcaggcaaacactccaatgctgtgatagccattcttgttggtcaacttgatgtcaacctgactccatctcaagtggaacccaaatgtctgcacaccagtagggatgtttttttcttaattaaatcattggaagcaggaagacccacttctaacccagatcttggaggtgggaggtccacctttaatccacacctcctgctggcagtatgctatgtaaaagacatggaagaggcttgtgcaacctcactagcaagctcattcattccttcactggcattagagtctattttggaatcctggttagtactgacaaccagcttagacatccagcctcaggctcatggactgaacaactactggattcttgggccttctttttataggcagccattgtttgattagctggaccatagtctgtaagatactttatatgttaacactagaaaaccctaacaaatacaaacattgaaatgaaaggcctcatcataactataacccatataaggcccgtcctgcagtggttcacttcctccagtgaggccccacctcctgaaggttctcaaaacaccagcagcagctgaggccaggtgttgaacacacgagcctctgggcacagtttatgctcacactataaagcttaccaaaataaatgataacacaagatcatgacacgatccatccggaagcagatggagtgacagacaggtccatctggaatctgggttagccaagttccaggaatgggcatgtgctgctagaccttaaaaaatgagggcgcttctgcaaggagcaacagtttacctgagggtgagagagtgaaggctgttgtgaaattagagctgagagccgggactggggactaccctctttggtctcttgtgaaagccttttcccttgtgacttgaggccaaagttcaagcccctcctctctcctcctcgagacctgccatcactgcctcccacacaaaactccctacacccaaggtgtctcaagttcaacgtggcctggcggccatccttctccaccataaccctcaggctccttttcttggtgtctctcctgggtttgcctcacttgccctgagacaaacgagccatggctctgcctccaaagggtcctcatgagcctcctcccctcctcccccannnnnnnnnnnnnnnnnnnnnnnnnnnnnnnnnnnnnnnnnnnnnnnnnnnnnnnnnnnnnnnnnnnnnnnnnnnnnnnnnnnnnnnnnnnnnnnnnnnnnnnnnnnnnnnnnnnnnnnnnnnnnnnnnnnnnnnnnnnnnnnnnnnnnnnnnnnnnnnnnnnnnnnnnnnnnnnnnnnnnnnnnnnnnnnnnnnnnnnnnnnnnnnnnnnnnnnnnnnnnnnnnnnnnnnnnnnnnnnnnnnnnnnnnnnnnnnnnnnnnnnnnnnnnnnnnnnnnnnnnnnnnnnnnnnnnnnnnnnnnnnnnnnnnnnnnnnnnnnnnnnnnnnnnnnnnnnnnnnnnnnnnnnnnnnnnnnnnnnnnnnnnnnnnnnnnnnnnnnnnnnnnnnnnnnnnnnnnnnnnnnnnnnnnnnnnnnnnnnnnnnnnnnnnnnnnnnnnnnnnnnnnnnnnnnnnnnnnnnnnnnnnnnnnnnnnnnnnnnnnnnnnnnnnnnnnnnnnnnnnnnnnnnnnnnnnnnnnnnnnnnnnnnnnnnnnnnnnnnnnnnnnnnnnnnnnnnnnnnnnnnnnnnnnnnnnnnnnnaccccacgccccgagggggcccgcgttgtctcccccccccagaccgaccccccccacgactccgacccgcgcggggtggacccgccgccgcccctgtctgctgaaagacgttggaagctccagctgcatcagataaaagtcttgatttcctcacctgcctgtcatggacgagctcccgggaccagcagttggtggaggaaggagacagaccatgctcctgggctatccgttccccctcacttccgcccctttcctctgccgccatgaacccaatttgctcaggtctcaactgagttcctttgatctcaagaaggtacatccagacttgctctgaggagccctcatggctgtctggacaacgagatgaaaggggacaatcttggaaatttctgacaaagccttttttctccaacataagaggaagataaatgtggaaaagcactttgtccatcattcttcattgctcttccttgaatgaaatatgttcaatgctcatagcgactgcagccactttgcgataatgaggggccaagctagactgagacaccagacctgacattaccaggcaagctagcaaccgccttaagagaaaatgaaaccacttttgttcaggtcgtgctctgttggaaaccctaacaaagggagggaaggggtgaggaagatttcagaggcacctgtgggtataagtggtgcagctaatttccccaagtgctacgagggcgtggcacatgggagaaagggacagtcccttgtggtgagacatggggccaagaggttctgcagcagccacttcaaccctggggacacacccagaataacgctttctcaaatggtctggacactctgtaacctagtcagtatgactctcagaattaaccatcaccggtgtgtgctccaaccactatctgccaaggacctagtgggctccattgaaagggtgccccgcccccgccccacctggattaaatgcggagcctaagtatccttcctggagggaaggagggagtcacaatgtgaccattttcttctggccagaaagaggctttgtccccatctcatccctggaggaaagtagagctccgtgtcggctcagcacaccaggtaccattcccacctcccgcacgtgctccggcttccgcgcgtggtgctctgcagtgagagcgtcctggagtccggagctcccgggcaggccaggctagcttgggagtcgggacagagagttaggatggaccaagacaggcagcgaaagtgatggggagaaaccagctccaccgttccccatccttgactatgcctggtgtccctctgcgtgtcccccccccccattgtctttagggttggcgtcacccagctggcacgggctctccaggctgcggcgttcgggcgccccgcggcggcagcgcgccgctgctcgtctcccggcgggtgtgcagcgccctctgccgccggaagatcttccttccttctcttctggcgctggtcccgcatcatcaaattgagtctgacccacaggcagagggaataggacaattaggctaccgagtctgctgcattaaggctggggaactaacacgaacaacaaaacatcctatggcagagacgccctggctgctgctccgggagttggcttttggcagagcaccagctcgcagccatgtagggtggacacaggctccaaacctgtggagtgctagggaaagaatgagaatttaaaactggagaaaataggcggggacgatgaaaggctgcgtgcaccgttggtgctgtggtgaggggatccctgagtgcccccagattctagatggaccctacaggcaggccaacttccgcagtcagtccggaatgctccactggccaggacgatgctgggaacggcaagggtctgctgtgggcagaggcgggtagggtcacgcagaagccccttgcgcgtgcctgtggtttgtggatggagacaggtctcggggacacagggctagccctttagcatggggagaggtgccgcaggacagaaacagacggcaggaagatgcccggaggcggaaacggtcactggggagtagaagggatactgagcactagtgaacaacaacacttggggggggggggcagtgtgctgaaggcgctacagaattgaagtgaggatctgacaccctctatgcccagggttagctatcggaggcacccatcaggatggaggcgctctcactggtcactggctgggtgggtgagaagaccagcatgcacgctgttgttgttgttgctgctgctgctgctgctgctgttgttgttggcgtggtgtggccatctgaggccagaagagggcaccacatcccctggagctggggttacaggcagctgtgggtggtaggaacagagctcaggtcctttgcaagagcagcgagtgttctgacccattgagccctctcttcagctacagaaggtctttccacagtggtgcacagcccgttcgtcctgaggacacaactggcaggagggcgacactgttccacaggctggtccaggattgtggtatcggcagggttgcctcctcctgaggtacctcctcttgccacatctccacacggccttccctccgtgcatgtgtagtccaaactgctccttctttaggagatgtatatatctttattttatgtgtatgagggtattcgctactttcctactgcagcgataaggcaacgtgactagaaggaaggtttatttagggcttacagctccagagggttagagcccatgatggcagagcagagggggccagtggcagacagtgtggcggcagctgggggctcctatctgaattacatacgagaaggctcctatctgaattacatacgagaaggctcctatctgaattacatacgagaaggctcctatctgaattacatacgagaaggctcctatctgaattacatacgagaaggctcctatctgaattacataagagaagcagagccagcacttgatgtggccctgagtcttttgaaacctcaaagcctaccccagtgacataatttctccagcaaagccacaccccctgagccctctcaaacagtcaccaattgaggaaaagtattcaagtacccaagactttggggtgaaagacccacgaagaggtactttcgtagaaggagacccccacccaggaatcagcgaggccacgaacttggatgcaaaagcaagaggctttattggagacgcgggtacccggggcgacttagcttctgtatggctaagtgccccgagccaagggaaaggggtccttatatagggaaaaaggcgcaagctaggagcagggattctattggataattctaatgaggcattgtacagagctattcccattggtcaatgtatatgaggcgctatacagggttattcaaatgaggcaaagtacagagttattcaaatgaggtgaaacatagagtctttcaaatgaggcgaaatacagaatcatttctattggatggttcaaatgagacacagagccattccagatcagcatattctcaaggtctggtgtctggtacaacagactcaattccccccccccttcctgatggctgaccttgggggcggagacctcgggactgagtgtttctcttcgggcgggggctcaggggcagggctccaggccggctcactcggtgtttgttctcgtgccgacccacctggtgctcgccctcgtgccgggcgtgcggcgggtggcgggggaaggccgccgggggtgggaatcggggaagccgccgacaggaggaagaggagacaaacttgagaaagaaagggctaaggggcaggggtctttcagggggacatcttattcaaaccaccacagtgatcgtttgcttgtatgtatgtatgtatgtatgtatgtgcaacacattcatgccatgcccaagaaagccgaaaggccattggatcacctagaactgaagttatagatggtggtgagctgccatgtgtgtgctgaggagctgagccagggtcctctggaagagcagcaattgctcctaaccgctgagccatcatctctccagcctcagaaaatgttctttacaaagcaccaactgggggagggggggtgggggagatggggggtgtgcctcataactataacttccagttccaggggagccaatgccctcttctggcctccttgagcattgcatacatgtgatataaagaaaataaaaataaataaacatttaaagagagcaccgacacatgctggtttctccagtgagctcattctccttcagtccctctaaaacagtggttctcaacctttggtcgtgacccctttagcaagcctctatctccgaaaaatatttacatttcaattcataacagtagcaaaatcacagttataaaatagcaacaaggggctggagagatggcgcagaggttaagagcactggctgctcttccagaggtcctgagttcaattcccagcaaccacatggtggctcacaaccatccgtaatgagatctggtgccctctactggtgtgtaaatatacatggaagcagactgttgtatacataataaataaataaataaataaataaataaataaaatagcaacaaaaataattttatggttatggagtcaccagaacatgaggaactgtgttaaagggtcacagcattaggaagaatgagaaccattgctctactgactaaggcacattctgagaccctgtgattaggacttttgtgtaggaactaatgggaaacaattcaatcatgaatactctccaactcaagattcccaaggtcactgggggtgttccctaattacagtgtagagctgggaagtggtggtgcacatctttaatcccagcacttggggagacagaggcaggcagatctctgtgagttcaagggcagcctggggtacagagtgagttccagacagccagggatacacagagaaaccctgtctcagaaaaacaaacaaacaaaagtctagagtagttgtaatttcaaatgagttaattcactttataggaatcaaaagaaaaatagaaactagcaagtaggtaataaaagcccatcacttctcatctgacagaagtgcctggggaattcctactgaaacagtcatgttggagtccctgattggcagattccccacccagcctctggctttgtgttcccactgtggccattttttttttaaagattttatttattatgtataaaacattctgcttccatgtatatctgcacaccagaagagggcaccagatctcattaccgatggttgtgagccaccatgtggttgctgggaattgaactcaggacctctggaagagcagccggggctcttaacctctaagctatctctccagccccactgtggccatttttatggcgtaaacagtacaaactaaagttagaaatagtccttcctctagctgtttctcaaggaagcaaattttttaattccttagttgtttgctctttctccctgtaacagagttggggcagtcggtgctactgaagctgtgtctgaggctctggagactccagctaatctgtcttttgccaggggttaggtgcagaaagtcccgctagtgtagagttaccagacatagcaagtacagatgcaagggaaggggtacctggtggcacatgcatgtcattcctgctatttgggaagctgtcacatgagaggatcccctgggcccaggagtttgaggccagcctgggtggcataacaagactttgtcttctaaaacaaataaatgggggctagagagatggctcagcaaagagcacttgctgttcttacacaggacccaggtttggttcccagcacccacacagtggctcacacaagtctgtaattccaattccaggacccctgttaccttcttctggtttctgcaggcactaggcacacatgttctagacagtcacacatgcaggcaaaacacccatatacataaaattaaaataaataaatcttggggctggagagatggctccatggttaagagtttttccagagcacccagcttcagttcctagcactcacatggcagctcacagctgtattcaacaccctcacacagacatacatacagaaaaaaaatgcaatacaatttaaaaaataaatctgatttaacctattaaaaaataaatggttgctgggtggtggtggcacatgcccttaatctcagcactcaggaggcagaggcaggtagatgtctgagtttgaggccagcctggtctagagagtgagttccaggacagccagggctacacagagaaaccctgtctcagacaaaacaaacaaaatgattaattagaaattccatttgggctgaaggtataggtcagtaggaaagcctgcatgtagctagctagcatgtgtgagatcctgaatccatttcctgtcaccaaaaactaaaaacaaaacaaaaccactacccagatgtccaattacatttaaatttccagatgacggcaaataattttagagtaaaaattattttagcacaaatattgcataaagtaagttatacacaaaggtgacttgttcatcagctgagaagtgaccaggaagaagctctctgaagaggacttggggaagagcttgaaagacccccggaggctcaggcccctgggacctcggccactccaatcaccatgcggaggcagaaacttgatgcaaacagcatgaggctttattgtagtttaacgagctaaccccatgttagctcaggccttccatccatccaccatggcagatggctaggaaagacgcggagaagccacggcatagagatcttatagggcagtgtaaggggagtgtctaggggtatgcacaggttcaggattggtgtgcctccaggcttggagggtttgccctgtgttgattggtcaactggttgttatggcccataggccctcccagggtggttgctatgctctgcgcgtcattgctgtgcacttgtccataaagcacacccagagccataaagcatagcgccaccagctaacttctgattggttccttgccacgaggcaggcatctgactttctaatgactaggacaaggtcatggcaaacatgtgttactgtcatggctgccgaaatggggagctggtcccttcaatggctgccgaaatgggcaggcatctgacctcctagtgaccaaggcaagatcaggcaagcacgtgctaggctgttatggctgctgaaatggggagctggtcccttcagtactggaccttgctagtcatcctcaaaggaggaggtggctaaataagggaatagaccttggtggcaatctaaccatttgtggcaagacagagggaatgggagagaagggcaaagcctgccagagccatgcttgccaggcctaggctggctagggtcccttcaagtgtaatggtgttaaaatgcagattctgggccctcttctaggttggtgagagagagagcacaggactgaccacagctctgcagctcagggtaagcagatagcagctttggggcactgcgtcctaaggtgcctgcttgctgtctgtggattccccaggaggccccagtgaaacaagcctgctggtcttggacatgcccaagtaggaaccaccttagagagagcgagtcatctccccggggcctgggaccaggcttccccacactgcagatcaccatggcagagcctcaggccaacctctttccccaaggctgtggtgaagttgaaatgagaaaacagaaggaatcgttatgtaaactatgacactcccaggaccaccactgcacccacctcctcctcctccttcctggtggttgttgttttgagacaggatctcactatgtagctctgactgtcctggaactcactatgtagaccagacagacagtcctggaactcacagacatcgacctgcctctgcctgctaagtgctgggattaaaggcgtgtgctgccatgctgggtttaggaccctcttgcctgacatggagtgataaatcctgtcttgaggctctatctgccacacaggggtttgaactcagggcctcactaatgagcacagtatcatgcaaccatagagctacagccccacctgtcagcttatggccttccctatcagtcacaagggtctcttgcaggaggaactgctgtctaacacttgaactggaagcagacaggcattgtttcccacaaaaagttaaatctaacactacacctccctgaggaaaaccagcagctctttcctctcagggccccctcccactcaagtgcttactcaggaactcctgggttcagagcttacactccctctgacggtggcctcaggctatgcccaggggtcccccagtgttctctggcctagggtggggtgggggcagaatctgtgggcctgtacaaagtcgagatcgctgtttcacggcagtgtgacctgcatcaggaagcaggctttccctgaacactccaccccagcagaggaagctctccctgttgcaccacaggcaaccccactgacggtttggacgtccctctgagaggctattctttcctgcctggaggatcccaaagcacactttcccatccctcctgctcaccccaaacctggctgggagacacagaggcatgtctttcctcagggctaggggaaggggctatgcttttccctcaagctgtggtatccagacagacaactctgtggccatcaaaggaggtgcacgggtcaggaaaacagcgattgcctggtggttagtagtccaaagccaggtggcactccaggctaaccctttcgggcctggaccagtctggcattgccacatcctgtttcctgtcccattcaacctcacttccctcctgcttgggctctcagcaggagtgctgccaaatagcaggcttacccggggctggctggctggtgcagagtcagggcttatgttggtctggccttttctctcaaagccagtggcccgggcttcatgccagctccaagcaggctggcctctgcaggacggtggctcttctggaattcccttgctaagatgacacccgaagtgactccagttggtgcctcttctgggatcatatatcccccacaaagaagctggcccacttttctctttccccatccgttactgccctgaactccaggagccttcacccaaggacatgaacccatcttggcgtctgctctcttcctctggggttttgggcctttcctgccagagtaagagctgtgggagggaaatttcccaccaacgtgggccctaggagagtaccagagtgggtgggcccgggtttcaagtccctctgggctgctgcttgagaccccatttagggcagatcgccagactactcccaccccacgcccaccccagattctgcaagctcaccacaacgcgctgtgacacagtttctgcacctgtaggcaggcctcatctcaactcttgtggccacagcagctcctagccgggccctgttgttcccactcttgagggggagactgagatccgagggtcagcagtggtctgggggctgggcgattctttcgtatagttttccaggcagtggggctcagaggagggatgcggcatccacctccggctttgggatgcttgttgcctggtctggggtgggggtggggctgagacactgagacctgaactggctgtaggtacagggagagcacagtgatccgggtccctgccagaactcaacaggccatctgctcccagaatgaagggtgggagtgctttggtctggcaggagaagttcttgagcgcaggacttaaacttttttcactggccaccccttgtaggccaccctagctataatgtaaccaatcaaacatttacaggaaacagttcataaataatttttaaagcaattcttatatatatatatatatatatatatataattttagcaaagatgaaagcaatgagatggatgtaattatttatatttacatagcaaatatgacactggctaggtattttgtgccataggacatggaatatcttcaatgttttccagaagtgatggaattgtaattgctaatgctgaggacactaattcatatatctgttgggtgcaaaataactggaatatgtttagagccatttcagaaatcatcttaggttctgtcttaatctcaagccacatttcattgaatgatcttctttttatgaaactcaagtcagcagctcaaacaggagtttttaaaatcaaatattcttacataatgcaacccaaagatatgttcttgtgacgcctgctgagggatggcagtaggaaaatattgaaagcatttgttttccataattaaacctcggtgtttttgtaagaacagaagactttgtatgtacagtaaaaatactgcagcttgtaccgtagtctcagatttgagccgaggggtggcaggcaacatttgctagtgttgtgtggcaccagggcatgcacactgttcagaaccagggctgccgtgacgtctcactctgcaacgcgggtgaacacagccagaaatgccggggattcattgcacctagtgtaagaccatcggaaagctcaggccttcaggatcttagcccaggacctcggccaccccaatcaccatgcggaggcagaaacttgatgcaaacagcatgaggctttattgtagtttaacgagctaaccccatgttagctcaggcctttcatccacccaccatggcggatggctaggaaagacccctccaaccagctgcatagagatcttatagagcagcataaggggagtgtctagggatatgcacaggctcaggattggtgtgccttcaggcttggagggcttgccctgtgttgattggtcaactggttgttatggcccataggccctcccagggtggttgctatgctctgcgcgtcattgctgtgcacctgtccgtaaagcacatccagagccgtaaagcatagtgccaccagctaacttctgattggttccttgccacgaggcaggcatctaacctcttaatgactaaggcaaggtcagacaaacacatgttcagctgttatgactgccgaaatggggagctggtcccttcactataattctgaattaatggttgctctgttgtgacccacagtttgaaaagctgggcttcgggaaatgattttgttgttttagtccactggatctaatgtattttgtgttctcagtaaagtccaccatcctttggtgacctttcagtcctagggggcctcagatggcctttccctctgcacactgcctgtcctctagatcccagcaagtgtcagacatggaaaatgaacaaaaggggaaaactacaggagcatgaggagcaacagccccacactgcccccaggatctattgtatttagctgggggctggcttacagtttcagaggtttagtccattatcatcatgttgggagagcatggcagggtgagggcagacatggtattggagcagtagctgagagatacagcctgatccacaagccaagagacagaactggacctagcatgggcttttgaaacctcaaagcctacccccagtgacactccttccagcaaggccacacctcctgatccttctcaaatagtgccactccctgatgactaatctttcaaatatatgagcctatgaggggcattcttattcaaaccactacaaacagcatgtgttcttaactcctgcagatatatatatctgcagcccaaattattataattttattatttatttatttaatgtttttgttgttgttgttatttgtttttctctgtgtatctttggaacctgccctggaattcactctgtagaccaggctggactcgaactcacagagaaccgcctgcctctgcctcctgagtgctttgattaaaggtatgtgccaccaccggcgtggccagctgtctggttctcagacagaggtcactccactggactcagaatgtgataactctcaacagaatcaagtgagtaccatctgaggaacaacagggggtcataaagtttttgggaggtagtttgccagagaaggcagagtgtgctaaggtcctcagggggaagccagccacaagaacacggtggtgtttagcactaggtgagtagggagttataggggatgtccttcagtttatatgtttctcttattggtggatgaataaaacactgttggccaataaggcagaaagataggcagaggagaattctgggaaaggtaggcaggaagtcaccacgtagccaccaggaggattggatgcaccaggtattcttcagtaagataagaccacatgaaatacttacattaatagaaatgggttaacaattaagacagagctagccaataagaaaccctagctaccggccaacagttttataattaatgtagcttctgtgtgttcatttggggcaaagcagctgtggaactgagtgggaaatcagtaacacaggaggacaatggcagagagtagggtctgttgagaaggaagggtgtgaagacaccacagggtgtgtgcggtaccgtgaaaggtgagaggccactggagggtttccagcagacaaatgacaaggccttacttaggatttaaaaagggaaaatcactttttggctgcatggaaggcagcctgcaaggtgagggcagaagtagaaggctggttgggacattgtggtcttgtcagtgggactggattgagaaacacctgggttggtaaagcacaggtctggctatatctgtgaggcatcatcagagaggattagctcctgggggttctggccgaatcaagagactaatctcttggttcatagtcattaccaggtagggtgagaggcaggagtggggcccaattgaggaagtgggtcattgggtgtgtgtcctatcttgtgatggcctcttcctgtatgacctctttctctgtttcctgtcttccatgagttgcacggtggtgatccacaatgcctccccaccatgacagaatgaaacttccaaaagcgtgagccaacacaaccccttcctccactagttgtttctcatataggggtgagaacggctgtggcaacactcggggaaagacactgaagtgttgctagggccactgtggtggtatacgaatcagcaccacctctaggaggtgcatgcttggctgatgtgctgccttgagctcccaagaggatgccaagggtgtagaggacctgctcccacctagtcctgaccgcagttgcacagatcctatttttttgacacccctcccccaacagttcctgtggctctgtggttttgcctgtccctgacttccttggtgtggtctgtgtccaccctctgattccttcattggccagctgcctgtttctcagacagaggtcactccactggcctcagactatgaagagtgggctgtacatggtctaggttcttgtctgcacaatttcaaggccatcgtcttgcttcctgtttcccaagctaggtgacagccatcttcattaaggtagaccctgctgtgccttggaggcaggctgagctgcagttcagacaaggccactgcccgagctgtgaggacagagcaaaggtcacatgggcctctgcaagcttctccttgtcatcagcccaaagaaaggaagccacctcagcgctataggaaaacaaaccgcagcttgtggtttcttactttactgtatagcatggtgaccctggagctactcccctgggacacctgctgcctctggcctggacctgccctgccctgttctctctctgggcccttgacttgggacagcagcctctttcttctgtttgtgtggatacccagcctgacctccacagtctgtcttgtacactggcttctgccatcacttgtcttgcctgtccccagcacattcagtctcagatcatggcccctaagatctgagtcactcgagggggacaaagtgtgaggagcatgcagaccgaggcctggctctgcagtgtgaccagctctgagcctgatggttctcactttaggacaggaagggcactcaccctgcagggtttgcagaggtgaagtttgggcagagtagtctagtggctcacaccgcatccccacatctgcctcagtgctccaggtgctctggacactgggaggtatgagaaaggcttggggcaggaaagctgtgcttgagggaaacccagatgtacaccccagccctacctctgtctccaccctgtgagcctagcaggtgtgggactgggtgctcggaacaggaggcctttgacctttctgcttaaggagttgcactgcagggtagactgtttctgtctcagaggaaactgttatacagcagctcacggcagagccctagggatggagatggggaggggtgagggagagtgaggggtgggggtggagggcatccacatgaagagacatgaaagcagggactttgtcagtgtgggcagctggcattcgtggatcaccaaaagcccgggcctgagagggctgcccccatctctccacccctggctccggcctgagagggctgcccccatccctccacccctggctctgtcaccttttctttccagaaggacagcaagctgaggacagtgagattgaagattctaagttctcagcaatgaagaggcaggtggagctgcagcaagggagaaaggcaaggttctgagagagcatgtcagcaagccagaccgagttgggagggaaaaggttaggtcacaggctttcatactgtcaggtcacaggaccttcaaactgtcagtcacagccttcaaactgtcaggtcacagccttcatactgtcagtcacagccttcacactgtcaggtcacagccttcacactgtcagtcacagccttcacactgtcaggtcacagccttcacactgtcagtcacagccttcacactgtcagtcacagccttcacactgtcaggtcacagccttcacactgtcagtcacagccttcacactgtcaggtcacagccttcacactgtcaggtcacaggaccttcaaactgtcagtcacagccttcacactgtcaggtcacagccttcatactgtcaagtcacaggaccagtcacagccttcatactgtcagtcacaggaccttcacactgtcaggtcacagtcttcacactgtcagtcacagccttcacactgtcaggtcacagtcttcatactgtcagtcacagccttcacactgtcaggtcacagccttcatactgtcagtcacagcctttatactgtcagtcacagccttcacactgtcagtcacagccttcatactgtcaggtcacagccttcatactgtcaagtcacagccttcacactgtcaggtcacaggtcttcatactgacaggtcacagggccctttttggtcaggatgccaggggagtgtttgggaccccccacagtgttggagaatgtcctggttgagcttacacatggatgacaaacctctgggagagactcataggtcgctgtgtgatgaccacatgaaggtccctcaggctgtgcctaaatattcttgtttgtgtaagaggtgaggggctaatgcagttgccaccaaattcgtgaaaagcccagaggtggatatctgaggaggatgactttttccattaaacctgagctgctgaagagctttttgtcctagagatactgtgagctctaccatgttcccggagctgcgagtaggggcaccgttccatgatgtgttgaaggctggctgttctaggaacaaagaccaattattgtggttcagaatcgctacattagagtaagagggtcaggctgaccagttatgaccacccctgcttctctgagtcaaccgataatttgggtttaggatctcagggagacaatgcgtccagggagggaggggcttggagccagcctaaggcaggtgcattgagatagactggggggaactgggatggaaatgactaagggcagaagatggtgcttgctctttaatgccatagacgtgtctccttgactttcattctgggccctttcttcgggggattcctctaggaacagcagctgtggtcctcctgtcctcctcgatgggtccctggcttcattcaggtcagaggacagccccactgtgccccgctgtcctgtacctcttgcggcccggtttcattctcccacggactatggctggactcgatctggcacagggaaccgggtcctgaatgagcattccctgctccagcgtcctgtagagagtgggtaggcgcaaggcgctgtccctctaatctccctaaggtgatgtctgctgcatcctcccagggaaggggagtttccgcagtcactccagcagggtgcgctactcccagggaacatgctgcccaggtgtctgtccaaacgagaatctggcgggcagggtactaagtgggtaaaggcgctccacaccttacccgtacctgctgacccgagtttgatccctgggacccgcgtcgtggaagaagagaattgattccttctgtaagctgtcctttggtctcctccactcgtgggctgtgacttgcacccaccttcacccctacaataggtaagctaaggtaataaaataggaatctgggaaggtggccatgggggaagattacgagctcttcaggccaggctggggcatttccccattgcccacgcccagtttcctccttggaattccctctcggatcaagtccaggaatgaggaatctctgtggatacagtcgttgttcactagtgcaaactgtaggggtaaggctgcccgtgtgcttattgtcaccagctcgattcagccatatggctggcctgttccaaccccctgggaactccacctcctggcattgccctgaggcactatccctctccctgcgctgggccctgggttagccctttaaaagattgtgggtgtagattttaatacctcagaacgctaattaagatcaaagcgactgtgaagttcaccctggggacctggagcccataagaggcttttagagacagcctttgccagctgtgtggcgcctgtttgcatcagtcaggcttccagggcttctcagagagattgcccacaccacatgacaccctgaggacgcaccttaccagggaatttagttcacaattaactatctctgcgggcagagactcttctccatggaagaaccttccctcccctggctccagtcatcctcacttgctgagccaggcatgtggtgagggaaggatctggaccctcgggagctgtagggaagagtgtggacccttgataatctcaataatcttcactctaactgggtcctcaggacacttctgaggtgaccatcatagggttgcagataggaggctccatcccactacactccaaggtgcttctgacgaatgcagggtcctttttactattaatctgactattgtaatcgcatatgagaatggtggaacctgggttgttggagcacaggctgtgacccccaagtttggtaatactgccaacaaccactgaggggagctacttatctttaagagaggcaaactagagctagggatgtagctgagtcagtagagtgcttgccttgtagtcacaaaatcctgggttcaaatcctcagcacagagtcaactgtgtgtactctcagccctctggaggtagagacaagaggatcagaagttcaaagtcagcctggatgagaccttgtgggtgtatcaggtttcactttttttgtttgttgttttttaaatggtttttctttccttttaattgttgtttctgagatagggtctcacactgtagacaggctggcctcaaactcatagcaatccactcaagtgctgggatcaagcctgtctgatcaaactacagtcttgcaaatgctgtctgactgccccatttcaatgacagagttatgtttgggggaaatttcccaaagttgaatggcttcaccagttaccagggcctgggtggctcgtgtggaacacgaagggcacgcccctccaccagtcagggctctatctgccctcaactttgcacttcaggccctgtaagaacagcttcctgctgctcacattacaacacaaaccaaaccgcagaggttataacttctctgtttcttctctcaggaaccaccaggcagggttgaggcccgcccacttcctgcacccgggcagggcagcaactgccacttgcttcaggatgtgaggtcaaaggcaggtccaaacaatagtgaggccacaccccagtcctgctaactagccataatggtcctggcttcaaaaggaaatactctaaggatagccgagctggttttacaccctctggacccgtggttctccaccttcctcaagcttcgaccctttaacacagttcctcatgttgtggtgacccccagccatagattatttttgttgctacttcatagctagttttgctaccgttatgaatcataatgtaaatatctgggttttctgatagtcttagggaccccctgtgaaagggtctttccaccactgctctagacctttgaaatggatccattcagcagtgtgacctagaggtagagcataggcctagggtttgatccctgcatggaaagacacacacacacacacacacacacacacacacacacacacacaccccaaaacaaacaaacaaaaaatgatgcaatctttatttatatgtgacaatgtcaacttgtcatctcttgtgtttatttctctggtggttcaaaccacagcttcctaaactgtgctctatcactccaaatagatttgacagagtgcagcaatgcacacttgtaatcccagtgctagggaggcacagacaggaacatcactagagcttcctagacagccagtcttgcagaatctgtgcattacaggttcagtgagaaacatgtctcaggtaaataaatgggaaagctagtgggaggactcgattattttacatggtatgcgtgtcttacccacatgtgtgtatgtgagcacttgtgtgcctggtgtccacaggggtcagaagagggcatcagatcctctggaactggagtttcatatggctgtgagccatcgtgaggctactgggaattgaactaggtcctcagcaagaaaattgctcttaacctctctgagccatctctcccgccttaaatttttctaatgagattaagaaccccaagaggggaccctaatttccccaatatcatcaggtattatctacactgatgctaacgggggactaatgtgtattactcagctgtatgaccttcatatcagtgagttaaaatagagagagagagagagagagagagagagagagagagagagagattgattcccaggacacacatgctggaaacagagaattgactttaaaagctgccttctgggtgtgtgctgtggcctgcatgtcctcatgtacatacacacacacacacacacacacacacacacacacacacacaataaatttaaaaaaataaaataaaataaaatttaaaaaaagaaataaaagaatttatgaacggactcaaacgtaagctcaaggacaattttgagtttaaaaggaaacatcccaagaagttcagctgtaagtctcagcagcttcccagaggaagggaacagaagaaggaaggcagacacagggcagatgagcagccacgtgcttgggagagcggccttagggggaaaaaagcccaaaataacagagcatctgaaagtgttgggaaagcatatctagaaaagaggcagaaagccaggcattggtggcacatgcctttaattccagcattcaggaggcagaggcaggcagatctctgtgagttcgaggccaacctggtctacagatcaagttccaggacagccaggactatgcagagaaaccttgtctcaaaaaaaaaaaaaaaaaaaaaaaaaaaaagaagaagaaaaggaaaagttaggcttttctgactaatacagagaagggagcaaactaacatggctgcatcccatagaagactgcacgggggagtgggaatccagtcattaaaggaatagtgattccacctaccactcctttctcaggatggtcccttggcaaaccaagcaaccagccaagcccagctgaaatgttcagtctctatccagggtagacagtctgtttgctcaccaaaagcagtttctcttttccattttcttcttttgtcttgttttgtttagagacagggtctcactacctagctttggctgacctggaactccctaagtagactaagttgctttgaactcacagtgatttgcctttctttgcctctccagtgctgggattaaaggctggaccaccacacccagccccaaatgagcctttataggtgtgctaacactgtgatgcatgggtttaatgatgagtcccgtatgttatgtcttggggtactaaggccactcttgatgaaagcagatgctccatggaggactgaagcaggccagacaagtctgaaatctgtccttcctgttctgtctgtcccctttgtcatcttcaccttgggctcagatttctgctcagctcttcatgtgggtataatagtcacttagaaaatgtttgcttaaggggttgatggtagctcagtggttaagagcaccagctgcacctccagaggacctgggttcaattctcagcacccatacggcagcacacagctgtctgtaactccagctctggggaatcagaagccttcttctgtcctctgcctgtatcaggcacacatgcgtgcaggcaagccgatgcagacaaatcacctaaaaatataaaatcaaataagttttaaaaaattagaaatgtttgcctgaaactgaaatacaagataatctctcttcctttgcaaggctatggatttgtaagtaaggtagctaagacaatgtccctgccaggccagtggcgccccctataggccattagagcctcctacaagctaggtgggttcctgttagtgtggggggagttggcctgactctcgccttttccttgttttcctctctgcagcatcatttctgctcaccaccatctgtctcattctcacaccgggtccctgaagatgcagggggattggggtccttagtcttactagtaagagaatttaagaatgaactcaagtggcatctataggacaatttattaacatttaaaagaaaagacccctggggaaggaaaattgtaaacctcagatgatgacctgaggattagacaagcaaaacaaagccgtgccatctgagcccgcatgaaggccagacacatggcagacaagcagccacatggtggagaaagagggatggtcccataggatccgtaaaagcatatttagaatctggctggcatccaaaagataaaggcagagagagatagagagggtggggagagaataaagacccagttgaacctcttggcaaactcatgggtctgtgtgtgtgtgggtgaaatcctgggaagaaaaaaatacagtctctcattaaagggaacaccattcggcttatctctgcatgccttacagtgaactcaccttcctaagggtgattctgtgagtgacctggcccaagggagtgttaagatttcctccagaactggtgggaggagctctttcttgatggacccttatgctgctaacattggtagcctcccttccttggttttactagttttccttgtggctagaactttgtcctgagtcactggcattttcaagtagtgattcacggaagtagcacctacttgtctgccagatagggcccatggcggcctccagccccgctctactggccagtgcaggggccagcattggctggacttctccacgccttgcttttctctctcctcattgtactcaacagttatgaaagacataatggtccccccatcctgtacttcttggggagactgtgtgagacgggcttcacagatgcaccctgcaaccagctacttgaggcagagtgaggtgcaggggccgagtcacgtgaacacacccagcatgctgactgtgtctccacagcagtctgcagcgatgtctcgatgtccaaataaagctgtctgaaaatcagagaatgaagcttgccactagctaaccatagaggtctggagatacatgagacacgtgaactgagggactactgtactcagcttcaagtgggagtctaataaagacatcacaaggacaacatgacaatccaaatcctccctagacagacgtccctgcactggccaccacgtctcagttgtggtcattcaccctggaactctgcagtgtgggatactgggcaggtactggatctgggcccgtcctctcaagttaaggatggggtcttctggtcctgtgccactgatggtgaccagggtgtttgttgtttccttcttccttcctatttaggaacttgaaacagaaaaaaaaaaaagtttattctctctgagcgctttcaggtgcacaatgaacggaagagcccagccctcgggactttcagtttcacctgctcccagccggcattccagaaggcctgagttgtgtttttgccgccatctagataacttctgctggccagtcatgtccctggggttccagctcctggaaaaggtctctctttatctgctcagtttgtaaaccttacgttgttctttctttaaagcaatctaaactagagccctgctctgcaggtagttgagacaggtccctgaggggcccctgagggggccactagtgacactccaacagagcttctaacatggttcattgagtctttaaaaatgactcaaatcttagccaccggcagtgcaacttgacataaaacactccatagcttgtagccaccttcatttctacacaggtgagcgagggtggccgtgtgacccacaggagctgtaagtcccatggctagagccacatcatgcccttctctcatcccctgtagatctgaatcaagtatgtacagttccccatgccatagcctcagagtctgggcaagggacactgacctatggataatggctaacagtcagctacaacctatgtgaccttctgcaacatgaacctaaaagctgggcaagggcaggtgtggtggcctgtggttaggacaaagcgcttgctcaagttattcaaaagccttcctgtcaattataccattgcattttacaaccaaacacagcccaagcactataaagacttttaggggaatatttttagattctaagatatttcttttttctttttgattcaaagatatttcaaacaccaggaaagatatttttctaacttgtgcatgttgaagaactcatacagcctaaaagcagtctgtccactggctccagggtggagctgtgacagcagacgaaagtagtagccatggaactgggacacagcctcctgccctgagagactgagttaggaacggcagccaactggctccagcttgtccagcagccatgtggatccttactgaaagccttgtctaaaaattcctcaaaagcagtgtgcttgtgtgagcctggggagatgcccagtctgcagactgcttgctgctcaggtctgaggacccagagttctgatccccaggacccacgtgataaagccaggccctgtggtacaaacctgggatcccagcactgggacatcgaagacacggggacccttggggcttactgacgagtcagtgtagcagattggatgaacaccatgagagaccctgtctcagtaaataagtaaacaaagtgggaagacacttgacatcaacctctggctttcccatacacacgcttccgtgcatgtctactcagacatacgcacacattcatttcccgccattaacctacaacagcaatcatagcttggcctagaatttgtttaaaattttttgaaatgtgtttttgaagttctttcactattccatttgtgtttacaaaatgaatgcattaaaaaaaatctttcagtcagaactactaattgacaatttatcggtaagtttaagccttgcaacaggcttaaaatttcccatttaacagataaggaaatattctgagacaaatttgaagtctcttgctcaaggtgcccaagggaggtggagggttcaagggttcaagagcaagtgtccctgactcccgaggtcaccttcttttcatcgcacagctttgccagtcagggtccccccagctctccagtcatgggttccaggaactaagaggaagttactagcagttagcgtttgtctgtgctgtggtttggccgtggagagtttccccaagagtggagcgagcatgctgtagtttgggctcccagctggtggcactcttaagaggggattggatcatgggcactactgacttacccctctatatctgaggtgaatgccaccttcatgagctcataatttcacaggctgttagagggcggagcctggttggaggaagtaggtctctgtggtttgtttttgaagagcccatcatctgtttacatttaaaaaattacatgtattcaactttaatcccagcattcaggaaacagaggcaggcagatctctgtgagttcaaggccagcctagtctacatagagaactcctggaaagccagggctacttagaaagatcctatctcaaaatagacaaataacacttatttacagtgggtggatgtgtgcacatatggatacacttttggacgtcagagggcaaccttcaggagttggcacttgccttccatcttctgggtctggtggatgaaactcagttgtcaggcttggtggcaagtgcctttacctgctgagccgtcctgctggctcctaaaggttctatcttatccccagatcacctctctttgaaaccctcagccaaaacaatttctccttcttatgataaagaatacgatgtgtccccgttggctcacaagttggaacatttggtacccagttggtggcgcttacttgctctttcctggaggcctcagaacctaggtggtagagccttggtggaggaagtgagtcactgggggtgggctttctgagcccgctctacactcagcttcctggtcccatgggttgtgagtaagcagccccacacttctgccatgaaagtgagccatgcactttctttctcttgtgggttgcttccatcaggcagttgttagtgttaactaacacgtgcctccaagttggtctctctggtattctgtcagtgaccaaatctggctaatacattttaaaatatagcagaaggctggagagatggctcaatggttacgagctcttgctcttctagaggacccgagttcaattcccagaaaccacatggtgactcacagacctgttccagggatctagttccttctggtgtgcacagagacaagcagaaaacacactcatctgtagataaaataaacatctccagggagaaccacagttaaatgtcttagccatggctgccgttttggtgggtccccaggtacagctccaagggttgataaggattttttgtttttaattatagggtgactctggaggtactgtgaaggggatttcaatctgataagataaaaccaggagccgatgaagtggcctctagggttagttatgttcacccatgtaaagggagtctggtaagattcctaggaaattgcagccttatagctgggaaaggagtagggctgtaaacaaaagttgtcacgggtgctgggattcttgattcttgattcttagcagacgagagtctctctcattcctgtggcctcaaaattgtttttctgtcctgcctcagtgtgtgtgtgtgtgtgtgtgtgtgtgtgtgtgagtgtgtgtgtgtgtgtgtgtgtgtgtgtgtgtgtgtgtatgtgatgtgtgtgtgtgtgtgtgtgtgtgtgtgtgtgtagtgtgtgtgtgtgtgtgtgtgtgtgtgtatgtgtgtgtatgtgtgtatgtgtgtgtgtgagtgtgtgtgtgtgtgtgtgtatgtgtgtgtgtgtgtgtgtgtatgtgtgtgtatgtgtgtgtatgtgtgtgtgtgtgtgtgtgtgtgagtgtgtgtgtgtgtgagtgagtgtgtgtgtgtgtgtgtgtgtgtgtgtgtgtgtgtgtgtgtgtgtgtgtgtgtgtgtgtgtgtgtgttttgatcccagggccttgtacctgctaggcaaacactgtaccatcaagttccagcgcttctgtgcatctatgcctatttcaaaagatgcaacattgtcctctgaaggtctatgtgtctacaacacctgccctgccaaactgtgtcgggtaactatggcttgtggcttctctttccacctcagaacccacatgaattaactatgcttcactggtgttttgttaacacattcaccaccagaaacaaaatgtttttctagctgggcgtgctggcacatgcctttaatcccagcattctggagacagaggcagcagatctctgagttcgaagccagcttgctctacagagtgagttccaggccacccagggctacacagagaaaccctgccttgaaaaaaaaacaaaaacaaaaacaaaaacaaaaacaagagaaaacttcctgtgcgctaccagttaaaaactctgtcatctcctgaagcttcacaagctgggaagattctaacatgtgggtctttggggacactttcaaaagcacagcctgtatgtgctatgggcaaaataattcagggtgttcgagatggcacttcccacataagtctaatgacccaagttcaacccctgcaactcacaggcaggtgaaaggagaaaactgacttcacatggatgccctaatgctcttgtccatcacacacacaccaatcatcatcataacaaaaatcaatgtgttattatgcccccaatagggtttttgagacagaaattcactttttataccaggctgttctaggcttgtaacaatcctgctatattagttaataggtagtcttgttcaagttagatgaagagaaatgaatgaagattaattatgcaaatatgaccttaaatattcatctcaaatatttttatcatcaccttcaaacatgtttgagatagatttaatcacactgagtattatactataaatagtctggagatttcagcgatcttgtgctaaatgtgggtattctgagacagtgcctgtcagggaagacacagactccccaggatccagaatggagaattgacagaggctgtggtcagagtcagggaagaaagaaccaagatgggagggcaggtgaggtcaatgcacggtgtcctgaaggagagcagggatccccaaatgtggacaagtgtgtctatgacctgggaaagccgacctggaacaacagaagcatcttgtgctagatttgatgtgtggccctggaggtcaatggctaggaaccaggtgaacccagggtggagaaagcagatgctttgggggtccttgggttcttcagatcccaggttagagttcctattctaatatttatgtgctaaatgtggtcttgggcaagttttgttaacttctccgagtctcagtttcctcatcctacaaatggagatggtagtgtgttcacggagataaggaatgcatatgacacacagtagggcttcgccagacaccagccccactacctctcctccttccccttctccaccccgactccacttctcccaaaggataaagggatagggagtagtttagtgatggggctgtagcaatcctgggaggtatatttaagtggcagatagtaacagtgaggagctgagccttatcttcctccagagtggagacataagatgggagttattatataattattcagtggtgctggcgatggaatcagggccgcagtaatggcagcactgggcccacgtgctccaccctgccactccagtggtgctgaaaggtaatgaagcattacatacacgggtgtatttcattccttatctgtctctccctccacacacagtggatgggtgggtggaagctgactttggggatgagcagtcctgctaaaacaaaccagggatttgggatcagggcctgacctcctcttgaaatgcaccgaaagtttaagaagaaacattcgattacatggtctggactaagagaaatgatgacacagaggacaggaccaaggtggggagaagagaagaaaggccaacagaagccccgtgtggtgttcatgccttaataccagcaggcaggctgatctctgtgagttcaaggccagcctgctccacatagagagtttctggcctagcaggccacaaaacaaaaaagactagttagcacagctgagggcaatgccccagtaacggccagcaggaccagctgcagaagcaagagagacacccgaggcacagggttgcctcatccactccgcagatgggaacaattcgttgcaggaaagctccattgctgctgctgcttttgttttcttcggggacagggtttctctgtgtggccttaatccaggcccggggaagcttgagaagaggcagctttctggaggacacacaggacaatttcatattcagcaacccctctcatgaacatagatacaaaaggcataaaatgttaatctcagcactcaggacgcagaggtaggaggatctctgagtttgaggccagcctgggctacagaatgagttccaggacagccaggaactacacagagaaatcctgtctcaagaaacaaacaaaatgtgttccccgcccctcccccatgttccatgagtgactcgctcaggggtgtgtgtgtgtgtgtgtgtgtgtgtgtgtgtgtgtgtgtgtgtgtgtgtgtgtgtgtgtagtactttgcgtgtgtgtagtactttgcaaagttttgttggggtgctgcactctgggaaagaggggaacattccagaatgggaaaggaagggccagtctgtggactctggagagctgctgggatgggggaggggaaggaggaggggggaggggaagggggaggggtaaacagagcaagcatgggaagaactagcggctgccatctctgttaaaaatccaggagacaggagttctgtatgactcttctgtgtcctgctgaagctggagatttttcctgcagagaaatgtttctgtactccaaacatgtacaaacatatttctttaggctaacttcttagttatcagagaataaaataaatttgtaagcaaatacttcctgaatagtgtaagcatctttaggattaatttatcaggggctggggcatggctgactcatttcttctacctccagctctttttttttttttttttcctgagaaagagtttctctgtgtagctttggagcctatcctggcacttgctctgtagaccaggctggcctcgaactcacagagatccatatgcctttgccttccgagtgctgggattaaaggcgtgtgccaccaccgcctggcttacctccagctcttaaaaaataaagaaagaaagaaggaaggaaaggaagaaagaaaagaaaagatgaattgttttaaatggctaggctgcagtaaggatgtttgaaggcacaactcacacatgtagaccagatgggggaggggtggaccaaaggatttagatacttagataaaaccccaaatccattaaaaatgtattgatacgcatgtggtatcaatgtgtattgagaacactatctcacctgtctgaaagtactgatggcacaaggtgacttagtgaatttgaaattagacaaagttacacgaaattattgccagctgcatttcccaccaataacttcagttaattcctacaattaactggtgggtccagacccatgtgtctccccttctaacttattaataaatacacttaaaaatttaaaagttaacattaagaaaaagcagggatgagttctgcagtacccacccacccttgcctacacacacgaatgtctttagtgggtataaagcatgatgctgaactcattcacagtcttaactgtgtctagcttgtgtgtgcgtgtcctaagactaatgtcacgttcttcccccactgctcttccccttgctctttgagacagggtgtttcacaggtcctagctctcgcagactgagtccagggggacctgtttgtccccaggcacagtcccagaactggattacaattgtctgagagcacctgcctcttgttttaatttgggtgctgagggtctgaactgctcacagtgaaaggctaaataaaaagaaaggcaatagtgggtaactttcctcgaaaccctgccaaagtatgccactaagcaagagagttagtgcaagaggtttgtttactgggggagtgggtgagtgaagggccctgtcggagtggggacttgagggaggcagacaggcaagagggagaagagaaacaagagggaaaagaggcaagagagcaaaaggagagacaaagacaagagacagtgcagagcgcgagctggccccggcagacacctttacagggtgcccacgtggaaaggcttctggcgagaggtgatgatgtcactgctttggtggcagaggcaggcagctgctgtggccgtagaaactcacacacaaggtccttattcttgcaaggcaaggcactttattgtctgagctgtgtcctcagcctcgtttacaatcttttcttttgaagaaacggtatataaagtttatagtgtaaactaatgtttacggtacggggtccctcccctccccctagtcttttattttgtaagttaaaatgcttttacgggaaacacgtgctgtagaggaatcccaacgaaatctcgggtctgggtaaaaacgtgaggaatgaagaatgtctttggtattaggaatagtatttattttaagcccctccccatgtgtcttgcatggtgtttttcctttatcattggctgcagaactctcaataggattcattaagggatttgccaaggttcacgtttggaggttttctgacagtgaagtgcaaagcaaacgtctgtggggtcggattgccacctagggcgaacccgaacgcaagggtgacaactccatgtttgttttcaggaagggctctgaggagcagacgacagccctgtgcacctggagctaggctgcgcatcaaagggcctatcccgccttcccctgagcccgcagtgctcccgaggcaggatccactcagatgtctttaataaggcgtgatagaaataccttgaaaaaacaaaacccagcagcgcgaggctgggggatttaactaactgctcggactctcagcccgagaggaaggacacagacaaccccgtagtgacaacagcaggggagacgggggaaagtttggggcgcggcgcccgcgggcttctgccgggctccatttccaatcggacccggcggggcagcgagcgagcgcggtccccttgctcctgcgtgacagcaccggacgcttcggctcggcggccgggtgagcttcgtcctcctcccagaccgccgctcccggcccgcagccaccgccggcccggggcactccgcgggagggcgcgggaccgggagcacgacgcggagtctgggcggccgagataagccgggtggggacgccggacgctccggagcgggcgcaccggacgcgccacggggcccgaccaatcaccagcgccggcgatgattcaaaaggttgagggaccaatgggggctcagggaggccttgccgggggcgggacctcgggggcgcgagagcgcggccgagtgtgtcgcgcgcggaaccgccgcgggctgctgggagaccgtcccggagtggctggagttgcgttcccgccggagcgcggccgggtgagcgccggcgcggggccccgccgcgtgtggagggagggtcccccgggaggctggcgaggctggggcggcgcgggccggaagcagagcgcgggtttcgaattgcggactccccccctctcccccttgggtcgcgcgcgttgggaactaccggcggccggggccgtgctggtaggggcgtcccggccctcggagggcgggcggccttcggggaggagctaaccgcctcccggaggcgaagcctcggctcccgaagcgccctcccgcctttccaggcctcgtgagtgctcctgcgcggtgacagccggcctcgcgcctcctgcggcttcgagggccccatagtgcgcgctcgggtggcgggcgccggctccggggcccttgaggtgacgacgggctggccgcgagtcaccctgccgttgcgcccgctcgctcgcccgcttgcgagccgctcgcccgctgtgccaagcccaggtgcacaagcgcgtgtagatctggggctgcagagagagagagagcgcggcctggggcacccggtccagaggggccgacgataagttcggtttagtttccgagcgttgttgcctggggaggaggaaggagagcgcgaatgagtaggactaaaagataaatgtacctttgggtattaagggaaaagggcactctcgatggctctgcgggggaagggacacagatcctgcgaacgggttcccgcttgcgttttgcccagccggcctgtagcggctgctcaggtgttcaaggggagctgtcagacaccgtttgagctttctctttttctgccacgttaaatgaatctggaaaagtggcgaagtgattacagacccttgtaactctcgcgagcaaaggagcagtccagagccaaatgacacccaagtagcaagaatctggcctaacagaaagatgcccgaggatcactgtttttttgctgtactctctgtgctgacttggctgaaacacccctttaagaaagggaagcctgtctgcatatcttcactagttatttgggtgcataaggacacacacacaagtgtctggagtccccttgtcctattttgtataagtctctcctgccgtgcatgcagtattttgggatgccatcacatagtttccactgactttgtatgggtcttgtgcaaagtggcgtgcacgtcatgttgctagtcccatcctttcttgtaaggctaggttgctcttcacctaccatatgaaatatcaccatcaagtctcagttcttcttcttcttcttcttcttcttcttcttcttcttcttcttcttcttcttcttcctcctcctcctcctcctcctcctcctcctcctcctcctcctcctcctcctcttcctcctccacctccacctttttttttttttttttggtttttcgagacagggtttctctgtggctttggaggctgtcctggaactagctcttgtagaccagctctgtggtcttgaactcacagagatcctctgcctcccgagtgctgggattaaaggcgtgttaaaccaccatctggcagttctttttatttttggtttgtttgttttttcgtttttattttgttcgttttgagacaagatctctttgtagtcctggagcacactgtagactaggcagacctccaactctcagagatgtggctgcctctgcttccgcctcctgaatgttgggatgttgggattaaagccaagtctcagttcttaattccccccccaatcaaatttctgactctttgacattatagacacactttttgaaaaaaattaaggctcaaatatctactaggtgccttgatttatgtatcccaaggtattgtacttaataggtaatagtttttttttttttttgacattgacttgtgttcgttgttgcacagatgtagttagtaggtgtctgaaagatgcagtagagaaatagcgatgagtctagggccataccatcctaatcctccagatctcattgatctcagaagataagtaggatgggcctggatagtacttggatgggatagaggacagtgagtgcttcagtggtccagtgtgaatctgtccgaggaccctttaaagatacaggtggtctggaagccccaaagtgctcatatttctggtttttgaagtgttgtttgagaccggagtgacatcttcatagaggaagactttgtggctttctcaaactttggatgactagagtaggaagctctaatgctagtgattggttgatttggggaggtctgggaaggaagatggggcaccagagaaggaagtccagtgcatttccttcctctttgtccagggaggcttggccctcaagtgtagaaatcaacaaagcttgatgttgtcaccttcctttgtttgtgcccttcctcctcgtgcagaagtggggcatttccctcctgtttcccaaggtcccctcaggtaatcttttgccagtctagtttcattcccagagcttctgggctctttcctcttccaagtccaaacatattcattaccccagagatgctatcgcacatgttagggagactgaggtagtctctgtaatgtacctctaatgaccacataagcacttgtgtttactttcatctgttgtctgtctaaacaaatgaagcttgtgaagctttttttctcaggtgattaacagtgaagaaatgtatttagaaagactttcttgggagtggcatataatacaactttctccttaattccacagtctgcaagagtccttatgtgttgctcttggattgcataaccagctcttggcaggagtgtctttatgtgcttgggtgatacatggagaattgcttagctggtgacatctgtagctgagcgtgtctttttttgctgcttgctccaccatttggtatcaagggcattggccagaagcactggttttatcctgtgactctgaatctgctagtcagagaggaaaaacacaactacctcagagctaggagcacagccatcatttgatattcctaaaaggatggcagagctgcctcatggaaatgacactgcttgacggttatagtttttttaagtgtatataaggcttcatgggcttaaatttgaaatagtggcaaaggatgctacaactggagtagctttaggcttgtaggcttggagtagcttgtcagctgtaggcttgtgaggcgaacttggatgaaggcccggtacgtgttggccaaccacccacccacctaggccaacatgttactctgtatgcacttgggatttgaatgcagactttctgaagtaaacctcaaatatgttattctttatggacttgaagtccttcctgttggtagattatagtaatgctaactgtacatttttaattttcttggtttgtctcatggtttatcatttttccataaagtagcttgttaaaaatataattaagtgcattttaaagctttttaaagatgacaaagatttacaaattaaaattccctttttgagatgtgccctgagttttggttactgcaggtgagtagcattttgagtaatagggttttgatgcctgttatgttgtcaaagttaattctcagaatcacctcatgtatcccaaatgaagtaaaatgactcaaagaatagtctgtgttgtcctgctattccctcatctatatttgtgaacttagacaaaacattaactttaagctcaagttttgtcatctataaaataaagagccgtgcacactttccttggccagttaacagatctagaaagttgtgtttaaggaaacaacctagtccaaaacaataagtagtaaatattgactggattttttttctttaaaattgtacagactaattttagaaaatgccaagtaggaagtttgctgaaggtgaagtggtcagaggtcggtggcctgggagctccctttattatgaagtagaaattctcagctatgacaacaagtcccagctgtacactgtaaaatacaaagatggaactgaactggagctgaaggagagcgatgtcaaggtgagtgtaccttaggcttgcactaggatggagggctacaggcacatgccaacctctggctttggagctctggggctcagggaatgtgtgaggtatgggtgcagatcccaacaagctcatacccttgggtctgaccccttctgggagtgtttgctgtaagtgctgtttgacagggtgggacaggccctggtttagggattttttaaaatttttttttatttttatttttattttttttttagcactgtttccttgagttgagctctaggacaaatgggaaaacaggtgtagggatggcagcataccaaaggctagtggatgatcagacacagtcaagtaccagagaggtggatggctggggacagtagaggggtccacaggaggcagattgggggattttttttttaatagccatgtacagggcttgagtttcttttctgtgtgtgtgtgtttttttcccccaagacagggtctcgtgtagccttggctgtcttggaacttgctttgtagaccaggctggccctgaattcagagccctgactgcctctgcctcctgagcgcagagattaaaggtgtgcactactgtctcttggcagggcttgagtttcttccccaccctggtgatttaatcagagtgatgtttctaggtttgatgtcagctcacagcttccttcccagcctatctgtcgagggcctaggttttatataatagcccatggcatacaaatacttacataaaatccataaaaattgatttgtggaaaaatattttaaagctgcagagttttagttgtattctacaggtgtgaaattacttagtcaaaatgttctactgagaactttgcagttttgtatctgggtggtgctggtgcactcctttaatcctagcatttaggaggcagaggcaggcaggtctctgtgaattcaaggccagcctggtctacagagtcagttccaggacagccaaggctacacaaagaaccctgtctcaaaaaaagaacattttgggttttggaccttgtgacctgtcagtaactaatggttattgactgttagtgggtcacacataccccatgtgctctagaaaatgtcttaggcttcatggctcaaaggtttctgtaccttaggggcagggcagctccaggcagtatggcatgtgccttctcttttgatgccgttagcactcatttaagatacgtagatgccatccttacctgagggccacatacacaaaacagcatctgaatggggctcagggtttgccttgctcaagtctgtatccctggaaacgaggaaggagtggttgcagtgatcagagcagagtgcagcggagccaaggtttcagagtgactctgtagggctgcttaccttttgaaaaattggttgcatgctaattagcatgtcttacatgtcagttttagtcattatcaattagaagtctttcttgtgttactgggaatatatacaactagtggggtagacactgactccagggaaataccttccaagccagcagaggaggggcagcactgtttgtttcttccctaggagctagaatcattgcagcgatcccctctggttgtgtgtgatcagttctcatggattagaccctgtgagtccctttatgtttaggatggatggcagcagatagtggcccttactgacatcttctagcttagctctgccactggatgctagtgttctgaaaacatctgttgcttctcccttcctagcctttaaaatcctttaagcaaaggaaaggtggctcaacttccagctctccttcaagacgccgcagcagtcgctcaaggtcacgctcccgatcccctggcagagcaccaaaaggttccagaagatctgcctctgcttcccaccaggctgacattaaggaaaaggaaacacggagggaaattttgcaagttaaattgactccgcttgtattggtacttgtttcatctataactgcattggcttccccctttatataatgcgtattcagattactcgcacttttgttattgagacaacaaatccaagggactagccaatgtttgaagaaacatagttcttttgaatgcctaagaaaaatgtttttatacctttaatcttttattttctgtgtgtgtgtgtgtgtgtgtgtgtgtgtgtgtgtgtgtgtgtagtatgtgtatgggcacgcatgtagagctagaggacaactttgtgtagttagttctctttgtccacccttatctgagttacagggatcaaacgcagaccattgggcaggaaggcaggcattgcagctacagagtcatgtcactaggagtgctgtttgtatgtctttaaaagatgtttacattgccacagacataacttgtaggccatgaaatgagacaactatgctatggggaggttctcgctctcctaattggcatctttatggtggatcacctttgcttttagaaatggtgttttcagtggattgactttcatggtgcctgtgtggcacctggagacacctagcgcagggaaggtttttgttctgtgtttttaagtttttttgtttttttttctccaagacaggatagctcaggctggccatgaacttgatataatccttctgcctcagtcccctcagtgctgagatcatagggtgagctaccacacttggcagatgaatattttagagcagtggttctcaactttcccaatgctgtgaccctttaacacagttcctcatgtgtggttcccaaccataaaattattttgctgctacttcataactgtagatttgctactgttatgaatcataatggtaaatatttttggagagaggtttgccaaaggtgccagaggtgtctcgtgttttcttcttggctcagtagtgctttagtttgttaacagtttacagaggagtgaagagacgttgcaaccattatcttaaaaagctcttgcaaactaaatctcttctcgttttggtaagaaactgaggctgagtggagagggatgtgtaggaaggaaaaacttaagggtaaatgtcaggtagcataaaattccagtgcctgttgctgcctgtttagggtcactgaaggtttttgcctcattttttttttttctagcttatgaatgaatttgccagttttgacttaacccgactttcatagaactgttacaataattgacagtgaaattattgaaacatttagtatgagagtgtttgaaagatggaaaagtttgttccaaaacctggcatggtgttgtacaactgtaatcccagtactcagacaggagggtgaggctggaggattgccacaagtttgaggctagcccaagctatgcagtgagtttaaggttggctggttacatcatgaggctctttatctaaagactagaacagtgtacactgtaagagctgaccttggacaaccagggaagtctagttgagttcatctcttgactcttagcttgtctctgcttcatttccagtagtaacttgttatcattgtgatccttttagtcagtaacagttctgattatgatgctttcatatcccatttagaagccatttggaaacagcatcaatgtatacaacggggagcctgaacacacagagaagaatgacatatctcgtaaaaacaagcaggtaacaaagtgctgtcgttcatctggggcacttcctttccttttccttccccttccccttcctttcccttcctgtccctctcactctggagttacattagttcttgctctgtccttaaggctgcatgtgttttaacaaatttattcttgtatgtccccagctgtgtagagatgctgagttagcagcatttgcaattgttgtaaccttagatagttaatacttttttctttaaactaggaaaaagtcattttgtcaccagaaggcagtttcatagctacacagtacagccttcgtccaagaagagaagaggtcacggttaaagaaatagagtccaaggaacaaaagcgtcttcccaaagtacctgcacctttggaaacctttcaagtgaccactccgcagaggaagagcttggagtttggaggagtacctggtaggtgttaaaccccatcagggaggaagggcacggagttgctctcacatgctcagggaaggtctctgcagagaaggaacaggatatgaaagcctgagctgggagctttggcagcagagtaggaaggacgctgatatggctgtctgttaggtcttgagtttggaattgtaaaggagtggtgatgcgagtttgccctggggaaggtgcaggaagggtagtggtggtcctgtggtgacgggtgcagatggcagggcctggcttgcattcgtagcaggaacaagctgcggatgaagcgtcccgctgccctcccccgcctgctaggcagagtgaatgagctgcccagggagtgcagtgtgcagagccagcctgtgggttagtgagcacatgaagctggtgagagaaagcaagctcaggacctcaaccaaacagtctacagtctgcttggcttacctgcgctgctagttggtctgacacagatggtgtctggcatctcccaaaatctatacatgtgtaaaacctctctccaaaaatatataaagtctagtaaggttacagggctcgttttcaggcttgagtatagtggctactcctctatagagttcaaggccagtttgagttacacagtaagttcaaggctaatggaggctatgtaacaagattccgtttcctctcctcacaaagagtagaccaaccattatttggtgtctggctcttagcagttgctctttgggagactggagttgaatgtctttgagtcaggtctctgaggtgaactcatgctttcatcacttacccaaggttgtatgttgtatgttgtatgcccattggaggtgacaagtagagacagtttataaagttactacattttattactatcttgtgtggtggtggtggtgggggggagagcacgtgctaatgctgtagtgttcatatagaggtcagggttagctcttccacatgaaaatcctggggtttgtgaggattttgtggcaaatgcccttactgctgaaccatttcctcagcctgagatagggacagtttttgcttgcctacattgtttgttatgtgcaccacacatgtgcttggtgcccagggaggtcacaagagaacatctgctcacagatgtttgtgagcctccatgggtgctgggaactgaattcaggtcctctgagagcaagtgcttttaactgctgagctctctcgtcagcccctagatgacaaggctttgatgataccttatagattgttttcaaacagctgacctagtgttgccctaaatgtaaaaatatataaataaatgaacagcccacatggcttaaaagactaagcaagctgcctggagtttgagtgtgactggactgcttgtttgcaggtgcatcgctcatcatgctcggcctgcctgcctgcctcttcctgctgctgttgcagtgcaggcagaaggaccccagcctgctgagtttccctcctcctctgccagctttgggtgaactgtgggaagccagagtgtgtggcatctacctcctctggtttttcattcaagctctcttttaccttctgccaattgggaaggtaaggttttggggtttgtaaattttttttgagatatggttcttgctgtgtagtcttggccgacctgaactcaccaggtagaccaggctggccttgaattcacagagatgtctgcctctgcctccacagtgctgggattaaggccatcctggttgaaggcaaggttttgctgaagggcatggtatcgtgaaacttgtctgattctttgctattagttacatttatagcagtttcaaagttagaagctgtcggtcatacactggagctgttatttctgtgcccttcaacttactaagcataactttaaaaatacaatttacatatcttgtctaatttcctgtgtttacttttcttgtatttccaatagaatacctggatcatggtttgagggtgacacccataatagcagagaaatgacggtggcaagagagtgaggtgctggtcattgtatccacccagctttctttcctctttttcttaaaattatttcatcatgttgtgtgtggggtgttctggctgcaagtatatgtatgcaccgtgtgtgtaagtactctgaggccagcatcagttcccctaggactggagtcagatggttgtgagctaccctgtgggtgctggaatcactcattgcctgggtcctctgcaagagcagctggtgtcctcagtccctgagccgttgttccagctcctctcctttcttcagtctgggaacccagcccatgaaaaacttcctcacggctgtgcctagaggtttgcttagatcttgttaggttgacattcagtgtttcgatcacaaactttattccaaacaatccaaacagagaagagtaagctcaatgtttgatggcagcttatctctttggtagaggcagctgggcaaaagaacacctcctcagtgtgttcacttcaggtataccatcttacatcattgtcttttgagctccgtggattaaaaaaaaagaaacaaaatacagattacagtttgtttccagttttgagcctcagacatctggcaagaacacggagtccttttcagactcatgcattatcttccctccctcctgctgctgtgtagtctttcatttgtgtacctttcctgagagagagagatgttcagagagcatgagctgccctcaacagtacataatttattcagaccttattcttaggagactgcagctttgccagatggaagttctgttaggagcgtggagctgtggagtgtcactggaactggctgtctaggccttcctgtaatgatggacctaacgtcattcttattgtagtgctctgttcagattcggattaatttattgtgaggcttatgtaagctagataacatttatttggaaaattagttttgtggctaaaaatcttgcatacatacaaactaaagtgatatagatagatagatagatagatagatagatagatagatagatagatagatgataggtaggtaagtaatgggtgagtgtcagacagactcaaggttgagaagtcctctatctgtattatcagactaaggcctgacaagacacctacagttgagaagaatcacttggggttttgccagacctgtgatctcaggttttacatttctatcctgggttccttttccatagcaaatgaatagatgctggcagatgatgctgtcttagtgttgggcagtgtaaagtgaacagctcatttttgagtagctacttgagggtatatgtggctgcccatttactcagacagcatttacaccctcttggtcgtccctgtgccgtgtgcagtgggttttgccatggtggttccctcttgggaagcatgctcacggtcctttgctggagagtaccactcagcatagtagaggaacatgtgtaaacagtgaaacaagtcggtgtatgcatggtgttggcagcacactatcccactgaaaagaacctttgctcttcatggtaaactgttgtttacatatacacgcttactatggctgggttccctgtgtgagagtgagcgtgcacatttctttttgaggtttgtgtgacttcatacattctaatcccattttcctgcagcctccctctccccctttaaataaaaattaaatataagaggaagggccaaatgcaggtaatggacacagttatgaaagaggatataaagctaattgctttctggttccaatctggcatggatttttctgggtttgaggataggtagtacataactatattccatattgaaagtgtaaagattaacatgagctccacagcttcccttctcaatggactctaaccatggacgttcactgagttgtagagtctgtgggttttgttaatttctctgtgcgatattttttattgtttttacttatttttaagagaaccttacaaatatgagactggtttgtcagtgatgggaagccagtggagagttttgagcacactgaatcttgctctgtgcatgggagggtgtggtgtaagggtggttatggtggtagtccttctcactgagaaattaactagttacatatgtttaaggtaaatgcctgacagtggggttgctttatcaagggcttgacattcattatatactactgtatttcttactgtgagatacttaactttcttgggtatagtgaaattcaagagtttgaagagatcaaatacttaaatatgtataatatgtaagcaaggtgataatgtgctttaatttttaaattaaagtttaatatgttttcttttaaggttgtagaaggaacacctcttgttgatggaagaagactcaagtacagactaaatggtgatttccttaaatactcaatgactaacttttatagtttttaaactgttggtgttgattcactggatgttaaaaaggaggttatcttttagtagtttgaacttgtggataagttaactcattcatagctaatatgaaaaatgctgaatgaaccgaatagttactcttagtttctagctctctttgctttctactttatttgagatggggcttcaggtgttacacaggctagcctggaattcactttgtggtacagactagccactgtgcgtcagcttcctgaatactggcgtcagttgtgtgccactggcctgcttagtttcatttcttttttaagatttttattgtgttgtgtatgagtgtttgcctgcatgtgtggatgtatgtacaccacattttgtacctggtgcccactggagtcagaagagggtgtcagatctcctgaaactggagttactaaccattttgagcagccatgtaggtgctggaaaaccaatgtggtttcctaggttgaaaagagcagccattgctctcatcttttgttatttttttaattaaatacttatttttgcatgcacacgtgtatgcgagcatctgagtttgttgtaggtgctgttttaagtcagagtttctattgctgtgaagagacaccgtgaccacggcaactcttataaaggaaaacatttagcttcagaggtttagtccattatcatggtgggaagcaaggcagcaggaaggcagacatggtcctggagaggtagctcagagttctgcatcttgatctgaaggcaacaggaagtgagctgtgtcccacactgggcatatcatgggcatggtacctcaaagtccaccctcacagtgacacacttcctccaacaaggccacacctcctaatagtgccactccgtgttgggggccataattattgaaatcaccacatgcaccgtgtgtgggagctgttggaggctagaagtgttgaattctcctacactggagtcacaggatgttgtcagctactgtgtagtgctgggaactgaacctgtgtcctttgaaagagcagtgtgtgctcttaactgctgagccacgcctccagtgcccaacacgtacttttaaccacagagtgatctctccagcatgttttatttttctttttcctgttcattctttttgtttgtgtgacagggtttcaatggttagctctggctgtcctggaactcagttttatagactagccgaccttgaactcagagatccatctgcctctctcaagtactggattaaaggcgtgtgctaccaccgcctttaattttcttaataacatttaacatctgctgggcagtggtgccacacacctttaatcccaggactggggaggcagaggtagagttcaaggccagcctggtctacaaagtgagttctagtacaactaagactgttgcacagagaaactccatctcaaaacaaaaccccaaaaaaccatcaacaaaagaaatagcacttatcattcattaaatatttttctaggattttaccatcctgagcattcctggggctctagaggggaacccccccccccacctctgagccactcctgtccttgagtgcttggctccacttttgtcaaccctttgcctgaaagctgcatctttacctatgctttttacatcataaagctgtaattattagtgcttcttaattaagaggaagctgtaaggaagggtgtagaaatctactgttaactgaaaaagccaggagaaagctttggggccgacagttgtgcctttcccatcagggtttttcctggtaggatgtagttgtgggctaggttgtatttattatacacttgacactaggaagatgatgtgggcacttactgaatgcccgctcagtgttggtgcattcacgtggagtggggaagggaccacttggagtttgcttgacagatggtgaccctttggtctaggcgtctccatggtcagcacatgtgttagggctcagtatagctttacccactgaagactttgataaagtgccattaatgtgattttaagaaatctatgtggtagttatcttaaatgaatttccattttacctgattaggtagagtgatttcattttctgtcagaatcttctggcaaatgctcctcagtttaggactgcttacgtccgtgtaagtgcatcgtgtcttggctgtgccttaagttgcagatgtgccttgtgcagctggccgccagtgtcctagcctagcagcagagaccactgcagagcctctgctatcactcttatcatgtagcttactgcactgccccagcaccaggagaggacattgtgtggtatgttgtagtctggatccaaatttgagtgtggctctgcatgtgtcttgctttttgtactgtgcatgctacagtggaaacttcccaagttgaaccatagtactcaagaaatggtatgaataaattttaatgtttggctttcttcttttgtaatttcgggtagtacttgtttactggctcgcctagcactcttacgtgaattcattctgcaggattccagaagggaagcagaagtgttttcagggctgcctgcctttaagtgtcaagttgcaagccatcctagccagctctgtgccagagcatagactgtgtttgctggtgctggccagcttgttgtttttgctcagcttcttgctgatggagcctgtctcaggatctttcatgtgccctgtctcttgctatctgtgtctgggcagaagtgggttttcacatagctcttggtgtcttgggttttccgagccctgttttgtctccattgagggtgtagtctgttgagagccaagcaccaaacctgggcactcaatctttgtaagaacgtccctcctctgtttatttttgcttctgatatttgatttctttatgggattttaccactaaggaaattcctaagaaattttgagtagttattttgcatagactatagagtgaaaaagcaactgtattgatcacgtcataaattttatgaggggtaaaagttattccttggagtaaacttgatatgtagaaaacatgagtttagatagcaaatttgtggtgaccctcttaatttatcaaaccttagaaatcttctcattagtgaccatggcttttctgtgtgtgaattgtaataatataatttgatgacttcatctggaacacacctcagcacttcagcttttgcaagaaaaatgatttctttaaccaaaaggcaaaattgctcttaccaccacacattccatacactctcacacacactcatactctcacacatacacacacacacacacactctttctctctcgctctctctctctctctctctctctctctctctctctccctctccccccccctctgttggtcagcaccagtggcctggcctatggatcctcttgggggtttcactctgcctatgcatgagtgtccatgtgctgggattacaaatatgagtgatcacacttggttttctcagggtttgttgtggcctctgctgtgaaggttgagtatcttcatatccattttctaggtgacagaatatgactcaaatctttatatcattactgactagtgaatgccaacataaatattaataattttatacctactaagaccattcttctattaggtagtggcattagacttgaaattctgtgcttgccagtctctgttgggagctagttatttgactttggactcttgacagtttgtagtgcattttgagattcttttcagtttaatgtttttttttttgggtttttcaagacagggtttctccgtggctttgggggctgtcctggaattagctcttgtagaccaggctggtctcaaactcccagagatctgcctgcttctgcctcccgagtgctgggactaaagaggcatacgccaccaccatctggtgttaacagtaatttctataccctttctttcagctgtcctttaacagtaggtaatgatggttcgtagtacaaaagaatgttagcattttgaaagaccatacaagaactgtagtatttacattaaagattgcaccttaaggacattgcatatttctgactataatctggataatgacattaagacttaaacataaaaacactatattgactagtagctccttgtgcccaggaggctaaggtgtgtgggtatgtgttttgagcccaggaattcaaggctagtttgggtacttttttttttttttttaaacaaaaacaaatgtgagccctagggtgatattaattaacttctctctctttttaaggattcaacgcttttgtcctgacatctgccatcgtgggaacatctctcttctggggcatagagctgtgttatgtgtatactcacttccttcagttcgcacttgcagccactgtgttttcagtggtcttgagtgtttatctctatgctcgatctttgaaggcccctagggatgagctgtcacctgccagttctggtgagcagttatagcttgttaatttttagttattagaggactaaaaacctttagcagcatgttattttattatctgtctgtctgtctatctatctattttagtcaagtagtaaatcccttaaaagagcaaaaaacaaaaccagggtgaaagttgtttggttttgacctaagatttttttttttttttaaagtttccctttagtccaagcacttggtaggcagaggcaggaagatttttctgaatttgaggccagcctgatctcagtaaatagttccaggcaagccagagctacatagtgagaccttttctcaaaaaaacaaaacaaaacaaaaaacaaaaaaaacagagccaggtggtgttggaactcacttttgattccagcacttgggaggcagagacaggcagatctatgtgagtctgaggccagcctggtctacaaagtgtgttccacgatagccagggctattacagagagacctgtgaccaaccaaaaccaaaaccaaaccaccctccagtttcttagagttggggaatctggtcacaggagccctcaggtgtttcccaagtcctgtcctttgcttcttctccttccgcagtctcttcaagagcagattggacctagtgatggggaacagttggatttaaagacttgtgactggctaaacaattttcccttctaggaaatgctgtctacgatttcttcattggccgtgagttaaaccctcgaattggtgtttttgacctcaaatacttttgtgaattgcgtcctggattgattggatgggtatgtcttttatttttgtttgtttttggtttttcgagacagggtttctctgctgctttggaggcttttctggaactagttcttatagaccaggctgacctcaaactcacagggatccacctgcctctgcctcccaagtgctgggattaagggagtgcaccactactgcccaacctgatcagtcattatgaccgtcctttaatttgggttattccactgtgttttcatgatgagagtgaggctacatgtgtcagcaagagtagcatagagtgacccgaggcagggttgaggtgtcctgtttactgatggctatggggtggtgtaccctgggcttcttagccatgcttgtccctgggagtgcatttgagaccatcgtcttcctctttttctaggtggttgttaacttggtgatgcttttggctgaaatgaaagtacaggaacgtggtaccccatctttggcaatggtcttggttaacagtttccagctcttgtatgtggtggatgccctctggaatgaggtaaaaaaattattattattattattattattttgggggtcctagtagtccttgctggctgaacatgtgattttcctgtctcagcctctcaagttggggttacaggagtgcacttctgtgcctgcatgggatagttttaagagctgagttcttggaggccatgaagtcaagcagctttgagaggtagttttcctctgtggagcctgagctgcgtacttacatccagtgtgaggctgacacagctgtgtctggcttgtgttggtcatgatcttgtggctcaatgggggctgcacaagaacactggtaggtgtgtcaacagctgtttagaagcgactcctgttagcatcctaaagaaaaactcgggtgtgtgtgtcacatacatgggagggccagaggcctggctcagtgctactcttgggaccctgttgttttagagtgaggggtctcactggcctgattgagcagcaggctccaggactcgcctgtgctggtattacaagtgcacaccgcctcatttttagtgtcgattctggggattgaatttggaccttcatgcatacacagcacacactttacttagcgttcttcccagctgcttaacgtgatatcaacaggaggcttggagttggggagtatctgtctgtcctcagtgtctcagctagattataaagaagggagtgactttaattttttcagcacctggcagctgcttgtaattttgcgtgcagatctgctactttaggaaaccgagaacgcttgtgcagctgcacctgctttggagagtctgccttgtgaactgaggcccctagagcatgagcagggcttagggtcttaattggtcccaggcttcctgacacttgttcctcacactgactgattttggtcacagtatcgttcttatttgtcatattccctgggctcccccgtcacctttttctttgtcttggatcctcatatcagatcatatcccccagagatgctatgtggaatcatccttctgacatccagggttgtaagccttagggcctagatttgtgacctgactttattccatgatgatctggagtggatgcccctggaggtactacttttttctttagcccagacctagtttttcgataactagctagttgtattacttcaggggcaggtaccagagtttccggcactcagatgtgcttgtgagcctggccttcaggcatcttggtctagagatacctagtgaaccatgtgttcctgctaacaaactgagcatgagtgtgacacctgattggtttaccatgttgtcagccagcttgctgctcttgtggaccatgcattggagagttcagatgatccagatttggttggtagttgtactgtttttctacacactttgaacccataacttcttgctaggcactgtggcatgtacacctgacgaaagagaggcttactgtgcaatagagagcataagtggacaagtagagtgaccagtggctttctgggatgcagcatgctgacatctgtgcaggactggccaggtgcagggttaggaaggctgcaggaagttgaggtcagggaggccctgggcaaggacaaaagccttcttggggtttagatgtctgttactgcaggagttgagggtgaggagggggctggagaggtgggacatgtgacttaggccagagcaactgaactcctgcctttcaacattttggtgtgccttctcttaacatacttggtcataaattagcacttggcttaaatcctgtaaacataagatggttcttatttcttcccattgtaggaagcgctgctgaccaccatggacatcatccacgatggctttggcttcatgctggcctttggggacttggtgtgggtcccattcacctacagccttcaggccttctacctggtcagccatccccatgacttgtcctggcccttggcttctgtcatcattgctctgaaacgtgagtgctagcctctcttcagtctgaggcactgtgcctactgttttccggttgttgtctgtcacaccccatcttacctgatcacgggtgtgaaataatttatgatggataagtactgagaaaattctgaagtttgcagagaatggaagacttgctggctccactagcactactttcagtagaagattttacttttaagtttaagcaattgaacttaaataaattgaattgctttaggaacaatttgtctttcaaatgcctggattttctagaggctgaaaaatgagactggtcttcttacaactttgggtttccctgtagaaacgataccagctgctgtgtcctgaggtgctcacgcactggactaaggagcacatatggcaagggagccagtttttgaggaatgtcaacttgtacttcctggaggatgtggctttaatctgaggctcagtgggttaggatgggatgggagaagtcaagtcagcacaggtgaggggtgggtgggtgggtgggacagagggagaggtcagtttggctgctgagaggtcttccaggtcaggtggttttcctttagtccttcgtgattattcacacgagaggtggatgggaaaaccagctctgaacttccgacagagcgagtttaggacactaagtatcttcttgagggaagaggaaatccaagcacttggttaaagtgaagatgtcctttctccattgtttgcttatgcctgtcactggcactcaagtggacattgggatttgttattgggattgtagtgccaggtcatggcctgtggagatgtgaataaacctgtccaggctgaggggcttcacacagaagtgcagacactggttacgaggaagtgtctgagcgtagcctgcagtcagtggcccctgctgccgtgtcagatcctggtctctgtggacatggatggcttggctgtgttagtttttccttcaagatggatgatgagttaagatttcagaagagttcactggcattcagggcgtggatgtttattaagttccagatgattttagatgtaattcacacctaaattactaacaggaaatattttaaaatttcagtttgtggctatgtaatctttcgttgtgcaaactcacagaaaaatgcattccggaagaatcccactgatccaaagcttgcacgtaagggtttctttaacaaatttattgatatatttatacgtgtcggtttctatggctcattttttagaggtcattaagaggtttttgttttgacacagatttaaagaccattcatacgtccacgggtaagagtctgcttgtctctggatggtggggctttgttcgccatcccaattacttgggtgacctcatcatggcgctggcatggtccctcccatgtggtaagtaagcatctcagtgctaacttgatcactctatgtcattggttggggtgagcacacctgcctgctgtgggctccaggaccttggtgtctattagttgctgtctagtttctgagggtattgggaataagaagactttatggaacagttagtttgtgatttggcataccttaatcagaaaactagatcttcctttgggcacttgacggaaatgaggagaaatcatggaatggaaataaaaacattgagtggctgctgttgtcgcctacaggctttaaccacctcctgccttacttctatgtcatctacttcactgcgttgcttgtccaccgcgaagcccgtgatgagcaccagtgcaagaggaaatacggcctggcctgggagaagtactgccaacgagtgccctaccgcatactcccctatgtttactgaccccacaggtcagatgactcacaaaaacaagaagtccagacgaactaattgttgatgcactgacaagagctcttaagtttgttctttgagtcaggaccatagagccaaatagtgaaccttttaatgtagttgtatagcagttaatgtaagcggaaatacaaaggtggtagaatttgcttgttaataggaaagttttaatccctaaaaatctgaagtctcattttcaatttttttgccatttggtttttcataagtgaaaacccttaaagcacatctatgcttcatagtacttaaagagacataatgaaaattctgtctctaaatatatgtccacaaaccccagcccagtattggtggtatatgtgaagagtaagcagatccttaagcagggcctgcttaagggtgaccatttagagcagtggcttgacctcagcctttaaaagtgcatttggaaatgtaaatacatagcttacttttatgtaatatatggtgacttgtgatttttctgtacagtttgtcaatgtgagataattgtcaggaactaagtagttttttttttttgacaaaaacattttcagtgttttaaattaagtgtgtgtaaagtaatgtgaatttaaaagtgtaaagcaattagaattcatttaaagttaaaacataggaaagttatttttctttatccaaagtttgtgaatttggctttgctacctcaatttgcaggtgtgtttgcctttataaactgttgcaaatagaaaaaaaaagtatatttttggagtaacagcactatttaaacatttttacatacattggtattagaaaaattgccatttcaggctactatttttatatattttttgacttaaaattcaacagtgtttttgctactgttaaggtcatacagtttatactattttgtatcatttatgtcttcagaactccctaaaaaggagttctacctgaaacaactttaaggagctagttgaaactttgttttttgtctcagtttaatagatgtaataagctggttgtagccattcaattctagtgaggttgattagtttcatagtaactgtcctggagcaggacaggtggcaaattctctagacttttatattcaaagctatacatggtcctcagcatcttaaacacaaagatgtaattatagtgtgtacatttgggtttcgattacacatatatgagccagatgcaaatgttcattctgctctgcagcttagagtgtatgtaaagtagcttatattaatgtgatcatgaagttgacactctccattctgtaatttttagactctgtttttatgaaattgtcattgttttacagaactaaggtcttcaagcaggtgtttttctattttgcttttctcctggtatcagaaagtggtattggcatgtatgtgctggacttaacaagggaattttgggtaagatgaaagatgttgggttctctgcccgctagtgagaagagtctgagataggataatgcgccagtgtctgggtgtcaggtccaagttgtttttaaattgatgtttagcaagctttgtagtaaaattttagttgaaaataaagagttgctttgatcactttagagcctcctttttgcctgcagatctctagggttacatagcagcccatgctttgcagccttaacccattttttttccccctaggttcatttgtttggatctttctgagctttaggaacccagggactcctgaccaggtttcaagcttcagattgctggagcctgagccaatggtgattcattcctgtaaccacagctgtcctggaggttgagtaggagggtcaccatgagtttgagaccattctgggtttgagagtgaggtcttgtctcaaaaaccagaaccccataaataatgagtttagggataggggctcttagaaacactgagtgcctaaaagctgttgtagtgtctgtagcacttggaaaaaaaaatatattaattgcagaagcccatgtgttcatttcaaagccagcacacacactgcttacctagggaaatctcccttgcatccgctgaggctgtaggcacacggcgctacaaggctgttcccacaagtggatgtcttgatgtatgtaagtagagctcaaacttaaactgttttggtatggatatttatttcattcatttttctcacacagcagtgcaacctgcatggtgatccagtggctaggaggtttcttcgttggtaaatgcacggatgttaagaaatctgttagcgacccaggagtatttcttgacctctcaggtgtttggtaaaccggacattcaaaagtctggagttctgagtttttttggtcagaagcatggagcgtttcaatctaaaaataaagattcctagagtcaaatcacacttgctgttagtagctctaaggcatcctgctatgagttaaatccatgcagttgcatgttgaaattgtacctggagaagttaaaatagagataacttgatagctttctgtataatattcctgaaaggtaatgcaatattgtactattttgtctgaagttcattattacatttgaagggactctttttttttttttttttttttttttttcaagacagggtttctctgtattgctttagagcctgtcctggaactcgctttatagaccaggctggcctcacagagatctgcctcctgagtgctgggattaaaggtgtgcgccaccaatgcccggcattgaagggactctcaataggcttaagcatggccctggcaggccctgtctgtccttccccgttccctcttcatttctaaaatctgttagattgaatttgtagagtcagccatcaaaagcttcctttggctcacctaattaacacgcctaatcctaacataggatttccccttgtatctttataaactgccattttcctgtgtgccacttctgtatctagaggcaatcctttgccccatacccccccaccccagggtaaatacctctctcttctcctctatctcctgtctttacctcttgccctctgtgccgagaacttggtctgtgccattaaccagccctttgaacatttccctcattgagatttccttatcaagttagttgattaccttcagtggcaaaaagtggatatcaggaaattcacagcataagtcaccaggcagagtgtcttccaatacttccagttcaggatcccaccgtgctccctcaatgaataaaccaaaaatgatcacaccactgggagattggtcgggagagtgggcctgctcctggggctgaggagagagaagggtcaggatgcatctttctgaagccatgagcctcagcctaagaaaaactgcccccccccccccaaatgccctgtctcatgttgccctgaatgctgaaatgaaaccagactccaaaagtttcttggaggggaaaagcaactatgaaaggagtcagcaagctgtgcttttcacacaagactcccttacttcgtaagggtttgggaattgaagagtctgggaacaatgctgtagctcagaataagaatttggatttctcctgaactcttaggaagaaaattgccagcagctccaatagcatgtgtgtcctgggtagtgggtgtgccacactgctgctggtctgagggctgggggcagggcagatgaacccattatggctcaggggcctttgcttctctggttgagtgtgtgagtccttgagacaaaatgggcactgctgtcctgggtcaactggttgacatggaattgctgtgtagacaggccccagtgtggtcagggacacttctaggctgtgagtattctggaatgggaccatgtctggaggtgcaagctaaatgcctagaaacgacttgtattttcacttcttgcataaaatctttgtgggaattattttatacaatgccttttattctttttcccttaccatttgggtaagtggcaagtttcttccagtgcacttgttctagtattgtcttttcttatgcatcatgggagaagttaatctgtgtatttggtaatatgatttccacttataattacgtgatatggccttggtattcttttgagacagtctctctctcatatagcccaggcttgcctaggacttgttatgtaatggaggacaaccttgaattattgatctgtttgccttcacttaccaagttttggagtcatagctgtggccactgaacaacagtttgtaagtgattctacagagagctatttaaaagtaaacggaagctatcttactttatcctggtgtaaagcagaaagaagggagggcctgcttatacgctttccctttctgtctgtctgtcctcagatatgcagcattgtctcttacttctcttcagtcttctaacctttcattcctagtctgtcacctcttacacctcattccctgctcacttcactattaaatatactgcatttcccccagccaggactcctgttttcaaacctggataggaacacaagtcaagtctcagtatttattgtcttctacagctagctagaatctgaacataaactcaagtgaagacaacccatcatgaagattcacataagtgtgagaaaaagaggggcattacagatcagaggacgcgacactccacccaggaccccacaaacagactgagtgacattctatcctagcactccagaagcagacagcctctcaatactggaaaagagccgagacatggaaatgccagagtccccaaagaaacacatggaattcaattcaaaacatgcatagaaaaattacaaaatttcaagatacagccaggagagacaccaaactaggccattgaagaaatcaagttagaaatttaaaaataccttggatgaaatgaaagcaaaagcataacccaccagaacctttagggtacaatgaaggcagtagtcctgagaggagagtttgcagctctgtgtgctcctgttaaaagagtttaaataaataacccccaagctctggaaaagccaggagcagccaaacccaaggcaacagatgataaaaaaaaccacagccaggtggatgagatggaaagatcacacaacattaagcagacaaacagctgcttttttttcaacgattcagtaagattaaccacacaggcgccaaattaaccaaaagaaacggaaggtgcaaattaataaaatcaatgacagaaagggagttgctacaacagactaatgaaagctgggtcattagggaatgctttgaaaactcagattacaataaattggaaaatgggtaataataggcaaaatgggcaagtttctaagtgcatatgacctgcagaagttaaagccagaataaataaataaataaatctctctaaacatatccatagcgaaccaggagggggaagaaatcattgatttaaagagaaatctggcactagggaaatgtccagagatctacaaggatgacaacagctaacaatctaatgcgagaggctattttaaatgcccttccccgagaatgagattgatgacaccttatatgccttcatccagtagctgatggaagcagaagcagacacccacagaaacagctgacctgaacaagggggagctcatggaccccagactgatggctgggaaaccagcataggacccagccagactctctgaacgaggatgtcagtttggaagtctggttaatctatgtggcctctggcagtggatcagtacttatccctagtatatgaatggactttgggagcctactccacagagagggatgctctctcagcctagacatacaggggagggcctaggccctgctccaaatgatgtgacagactttaaagattcccccatggaaggccttaccctccttcgggagcagaaaggggatgggatagggggttggtggggagggaaagggaactgagattaacatgtaaaacaagcttgtttctaatttaacctaaaaaaaaaaaccctcagtacagtcaaggttggagaagtgatatgatgccaaatctaccaagctttcaagaagacctgataaaaatacttgtcagactccatgaaataagagtgtggaggaaaattgccaggctctttctgtggagccagcacaagattggttctgaactctaaagacaaaagaagaaaactacaggtcagtctcatagattaaaaaaaaaaaaaaatcagattgcaagtattttgtgatcacattaagatcataaatcacaaccaaactagttccatcccagggctgcaaggttggtgtgacatacaaatcaataaatgtcattaataaatgtaaagacagatcacatgatcatcacaacagaaggcagaaaaagtcattgaaaattccacataccttcatgataaagtcctgaacaaactatgggaagatagagccttcctctttataataaaggtgatatacaagtatatagttaaagatggaaaacagccctgtttcttggcacaagacaagggtgtccatcatcgctcatactgaacaaagtgttcaagaagacaaaggtgtaaaagagaaatcggggaagaagaaaagcagtttaaggttggcttgtgttgttttgttaaagactgaccgaaagcagcttagggagaaaaggatttatttagcttaaatatcctgagccaaggtcctctgagggaagccaagacagcagctcaagcagagtaggaacttggaggcaggaacacaatagactggaagaatactgcccacagcactctccccagtgagctgggctctcacgttacccattagtcaagaagatgttctataaacttgcctacaagcaatctgattgaggcattttctctattgactaaccaggacactatccctttgggcacaaaaaaaatattttatttttattttttttttgggggggtttcgagacagggtttctctgtgtagctttgaaacctatcctggcactcgctctggagaccaggctggcctcgaactcacagagatccgcctgcctctgcctcccgagtgctgggattaaaggcatgcaccaacaacacccggcaatattttattaaaagacctcatggactccataaaaaagctttcagtagagtagcaagatataaagttaacattcaaaaatcagtttttagtagggtgtgctggtgcacacctttaagcccagggctcaggaggcagagggtagggggacctctgagttccaggccagcctggtctacagagtttgagttctgggatggccagaactacatagtgagaccctgctcaaaacaaatacccccccaaacccaaaattagtagcttttatatatatcaaaactgaacttgctgacagatatattagggaaaataccctatttacaataaccaaaaaagaatctgagagaataaacctaaccatggaggtaaaattctataaggaaaattgaagacatcagatgatgggaagcccctctatgctcctgggctggcagaattagtttgtgaaaatgactatatcaccaaaagcagtctacaggttcaatgcaattcagaccagaattccagtgatactcttcacagaactagaaaaaaaattctaaaatttgtatggaaatactaaagatcacagatagctaaagcaaatctaagcttgaagttcagtattacctcaaactctactacgtagtcatggtgataaagacaccatgcacaaaagcacagtgataagcccacacatctgtggacacattttatctgcatgactaaacgagtcctacatttagccccaagatggagattggaccctgtcgtggctcctcagcacccagtacctggaaggctctcctgactattttgagcctcttctggagaagctgtgagaagtcatcctcttgcttgctgctggcgctgctgttaatcactctgtgagtgaaaagcacagcgtccatggagactccctgggcccttccatagtcttgaagaacagcagtaagaaaggctttaaagaaaaacagtgccaaagtttctgttaagcctcagctttcctgtgggggtaggcaccatggctgcccagtggacatgaaggtaagagccaggaaggaagggtaatgggtgttgtgtatcagtttactcccagatgaaacattccatcttagggggaagcttaggaagaacacagaaagctctcaagaggtgaaacattccatctcacaagggagcgccataaaactcaggaaggagtcaattcaaaagcttcaggaagtttctgaaactgaccagtttcaccaggcccctccctccccaagtgtaaacaaacagtaaggactgctgagagatactctcaggcatgctggacttccttggagagactctccaggttgtccagtcagttccagagtcctagctttcatgagctgtcatccatgttggggtggcctttggtgatgcagttgtctgagtcatttctgctcctctaaataaccccaacacactggtttactgagatggattttggttggttacctatctagtgtgaatagatgtttgttgacacttacctgggaatgatgccataccttggggtgagactggaggacaggaggggctagccacccacacttgcaggcctgtacacatgggctgtttctgtaggtttaccagctccctgtcccctctgtgcaggaagaggcgacagccctgggacctgagccttttctgatcttattgagattgatgattgattgtaccttactgtaatcttggtagcagagataggtcacagacagttgagtatgcaagccagggctcccgaggtggccccaggcaatgccatattgacaaggaggaagttccttcccccccaccccctgggcttgctaacctgcaacctgcctgtggtgattttgtctcaggtggcagagagggagggtacagacaagggacaaacctgtgtgagaatgaatccttcatcggggctgtgggcctctcgctgtgttcccatttcagtgacctcagctttccaagccaggtgaggaggccttgaatcctactgagctctagcctgccatctacctcatcatcacaaatagggaggccagctggttctgcctcccaactttccttctgtctgcctccttctctcctgtcccatgaccccctcctgcagccactgccaacttttgactagagcaaagacttccctgtggccaagaccaagcctgaacctctctggcctaccaatgccccctttcctgtcaggcgcctaggacctttctctgcctctctcccctctatccattgcaacaacttcctgctgcctccggtacagcgatctttctagcttcaacccacacaaactgtcttggggccttgtgtctgtccttggttgaatattcaactctaagtcaggccaaattcaaaatgtggtcacttggattgggttccctcattgtcctccaagttactagttagttgtgggactttgggcaagccccccccccctttaaatcttctttccctattagacgtctcatttcatgtgtgagtgttttgctttcatacgtgtctgtaccacatgtgtgcttggtgcctgtggaggtcagaagattaggggccctggaactggagttcagatggttgtgaaacactgcatcagtgttgggaatcaacaagagggagccaactctccagagtctctcggtgacatgtttttcctagctggacgcaacagggctggcagcctgcagtactgcctgaatgttgttcaccctctcctaccccatctgggcaattcttagttggtaacaagcttcaagtctcatcttagccctttccttagagaccttctctggccatcagctgtgctctccttgtttatgtactaagtgttgattcactcagactcatttgctcttaaagtattgactgagagctctgttggtgttggacaaattaggtaccaggggtacaacggaaaacaagagaccagcctacctgtccctgccctggtggagctcagtccactgtggcctctgcacagtcccttatgggtcttggctccctgctgtttgtgatatattagtgtctgtctacgtttcctgctggggatttgtgctgaacaggtagggtgcagcagacatgccaccaccaattctttttaataaatgagtgtccaaggtatagtctttcttcctgtgtaggccttagggaggtgtcttacttctgcacctttgatgtcatagaaccagtggcttagggatgagaaagtgacaggctaaggcctcgtagggccttgggtgtggggaagatggaatgagaagaagaggtaggggcaggccaggcttaaggcctacagggctgcaggtgctgtctttggggccagtggtggtgaagcaactgagtgcaaacatgccagagccagatatgggtctgccctgggtgctagtactcaccttgtggattgaagaaagcaggtagccagtatctcgagggaaagcttctggtgagctcactctcagagttggtgggatatttggatttctggttggccagtaatgtagtagactgtttcattgagacaaatgtcatgtacctgttgagaaaccagtggcagggttgggtggggcggggcatggcagtgtggggcggggcagggcagggcatctcagagcatagtaagcagctgttccccttcaagtggtctggcagcctcctccaggttacagctctcactactcaacccagcctacctcagcctcttcgttttatactttgatggacactgggtagagtttgaagtctcttagggggaaggagggtgaattgtggaagccatggatctggaaatgcttggctgggccttgaggaatcttagcacttgtttctgagttgcagactttgcccacagccaatactcatgtgctgtgaagcacaggagacagctggcacaggttagacaaagaacttgtgggtttgcatggcgatacttctgtttttctagttgtgacattttgggaaagtcatttcctgtgctgtggcatactcctttctgaacagcatagtggcaggttggtattggcctcccatcacaggacgtgatgacggggtcggtacctacctcccttcacaggaccactatgagaaacaagtcagggaaacacaactaagttttccacactattctgcatgccccaagggccagttttccaggcatagtgtgggatagctggaagaagcccaaatactgggtacttccagctcttagcatgggaagaccgtatgtgggaccccaactttgaggtctctgttttcttatcccaaaaggaaacggcgagaaaaaagcccaagagcctgagctgagctggcatagtgaggtgaatgggggaactgccaagctccaacagaagcagggaaggaagaaaggaaggaaggagaagctgtgttgcctcttgttcttaccgttggtgtaaggcagtgtaggccactttggcccaggtgttgaagaagttcacccgctggagaaggtcgctcacccagaagctcaggggcttgcaggacttgtaggcgttcttctgtggatagagagggaggcgcatcatttctgccagggagaaatgccttggcaggagatgccactttccagctgaaaacacattgatgtgtgaagactggtaccaaggaaatgacatcaccttgactagaagtgcttgtcccggccacagggttcattactcttcagccttagctctcacctcttccttccggggacattgtcttcatgaggaccccaggcttcctggtgcaagttaccaacctcacctactggacagtcctttcccttccagcccatcagagctggcccagcctcttgatcttctgaagtgtttctttctgcttgcagcctccactgtgcattctctaatcccattcacagcgagccctcagatatcaagagatgggggaatggggctcgcagtcctcagctgctcccatcttctgtttgcagtcgggatcatggcctcctgtccccacttctgtcctcattagaaatcagtggtcaccgcctcccgtgctgttggtctcaccccaccccccaaggcacccagttctctcctgaattctgtctattcctttcagatcccatcccatctgctttgaggtgatagctgttgcctgactcctcccagccctttcctttctctaccctcacccctgggcccactgttttacccagactgactgcaggtgtgactgaccctgcctggggtcctcacatctacctaactatcccctgactgtcccatgtccatctcatcacttgtcctaggctggacatccccagttagctgagctcagatgttacattgcaatttttcactagttcctattcatttttaaaagaattagttgtcgttgatgccttttactggtttccctgttttctacatagggtttttttttttttttttaaagtactgacctgcagttcacataactacacagttaactcttttgaagcacacattcaataagtagttgtcaaatgtatttactgagtcagacaaccaatactgcagtcaccttcagcatatttttcattactgaagtaaaaaccaaaacaaaacaaaataaaaaaacaaaaacctggtctttttgcttgcactgcttagttttctgttaccttcagttgggggcagctactatgtatgggtttgtctgttttggatgtctcatttaaatgaatcacacactgtggcctttgccgttccctccttacactgtagaagagccttggttttcagggttcacccatgtagcatttgttagcactgtttatgttggtggcagtcatctatactactttcctgttccctaagaatatggacatacagcttttgtaaacatttgaagttttatactaactaaaaatatggacaagataaaacagaatagccgaccaaaatactacaaaatgcaagattaaaaccagtgcctttctgcacacatggccctttaagacaccacttaaggcaactactaagatctggttttccttctacaacttctgtgtttcttgaaactaaaacacgtgcacttttataagcaaacatttgtccccacattcttccgaagctttaaaagctttacctggtcattgtgacatatgcacgcacaccttgtcttgtggccagaccttagttcacataaccagattctgctttgtggatctccaggctgtttgcagatttacactgcaacagctcgaaggtaaattttggtacaactgccatgctgccctctaattggttgcattcacttgcatttgtacccaaagtagatcagcacagtggtcccttaccgtctcctcatgtggatcagttcactcagtcattgtggagcactgacccttccctcaggctagaggcaaacaagcagtgtggttgctcacctgccacagcttgggtactctggctcgcaggaaagagtcgtatatctcctccaggtcttgcgtgaggatactctttccctttatagcaagttcaagatcctttaaagatttatgtatgatggataataacttatcgaaacgttgtatttcttggttcagatatgttatcaagacacagtggataaggggatcatggcctgaatttaaaacaaacaaaaagggaaaatgtaatgtttagaggggaaagatacaggattccaagctggaggaagtctgtgtgctttaatagatcatggttgtagacgttttctggagaattgtagacagcaaatattttattttttaaatcaaccatactgactgattttatgactcatactaagaatgtctcctcacctaatatgcaaatcagtaagcaccagctgtgtctcaagaaagctttagccagtcatggtggtgcacacctggggtggcagaggcaggtggatctctgtgagttcaaggccagcctggtctacagagtgggttccaggacagccagagctacatagtgagaccctgtctcaaattaaccaaaataaagctttatgtatgagcactcaagtctgaaattcatatagtgtttgtatgtcacagagtgtatgttctacctttgacatgttaaatgactggaatcctataaacatggagctggaagtggtggtgcatgcctttgatcccagctctctgagttccaggccagccagggctccttagtgagacccccccctttttactatatattttttaaacttgcaggcagaactgaaaatgatttagcatcctgagagatgcaccctaagatttccccattgtgccagtgtcggtgtgcttactcaaactgagacattagttgttagatgacgtaatctcatggggcactgttgacattagttgttagatgacataatctcgtggggcactgttgggtatgtgctgtcaccacctgcaccatcactgtgcattttggtaaagctgttgctcaacatttggctccaaaaagaattttggaaagagttaagactgtggagctggagggatggctcagtggttaggagcacgtaaatgctctttgttcttgcagagggcttggatttgattcccagcatccatgtcacgacactggctgtaactgcagctccttgggcacatgtactcaagcgcacaccaaaccaacatacaaaaaataaatttataaaagggaaatttaaaaaaggaattatggatgttaaattttaacttggaaaattctcccaatccaggcatttaactcctgctcagagctggccctgggcctgacctcacctcagtcaagaggctccctttctgaatctccaccatcctaagtaccacccgctaggcgctaggccggaccgtggggagagcagcagtgggcagctaccccagcagagcactgtgctgtgtctgccatgatgcctgctctctcactctgggttcatactgcagcccccctttcccctctgctaccatctcccatctggcctttgcaaacattggttcctctcccttcctctggggtcagaatctttcctgctgtggctgcagctccgggagaagcccagggctgctacttaccttcaacgcttttctgaagcttctcccacatggcacttaacatcatgtatttgaatgtgcactgactgtcaggcccagaaacgtcctcggtctccacggccaggggcagctgaacctttatgtcagacaggatctccatcactaggtcgtcattgctctgctcgggactgtaaaggaggcaggtgacaagtgaggcagagacccattgtctggggaaccctctgctctggccccacagacggtgagcagcttcacggagcccagggctgtgatacagaagaccccagagacactggacttctctttacagaggagaaaactgtcccctaacttacacatttataagaaaatgtgggtttgtttctaaaacattttttttttttctaacatctgcagataggcgtatgccaagactgaatgaggcccaggagctcaggggttctcagggggtcactttgtcacattcctctgtgcttatgcaagggctttttttttttttttttttttggttttttgagacagggtttctctgtgtggctttggagcctatcctggcactcgctctggagaccaggctgacctcaaactcacagagatccacctgcctccacccccaagtgctgggattaaaggtgtgcgccaccaacgcccagcttgcaagggcttcttgactgttatctctgggtgtgagaggagcactgcggctgcatggctagaggagactgtgggtgccacatggtcctttccaaagctgggaagttggggtcaggaatggatggatgaggaggaggacagggcagacagcgggaagtgggccaacaggggacagctgcactcctcaggctctctctgctcaccagtttgggcccagtttttcaccttacaccagagtttcttttcatttaaccaactgaatgccatgccatctttgaaagcagcggataaccccgacaccaccagtgtggccttttacctcactgcttctgggccaccttgccatctgtttctttctttctttctttctttctttctttctttctttctttttctttcctttttttttttttttttttttttttttcgagacagggtttctctgtggcttgggaggctgtcctggaactagctcttgtagaccaggctggtctcgaactcacagagatccacctgcctctgcctcctgagtgctgggattaaaggtgtgtgccaccaatgcccggcccatcggtttctcagtagccattcaagatagcttcaagtaatttccaaagtcaaaaagtctcaattacatcgacggtgacaggtctcccagtgccgtctcacagaccaatgagtttgtgtttgagtgatgtgattggacgaattatggcctctccatctaagtgaggggacactatgaaacacgtttaagattcttgttaaaagtattcctgttgaagagctatttctttcaaattcaacactcctttctagacaaagactccttcacactgaggaaatgaactaaacttagaaggcttaaggagtaaagtaagtcacaagtctcaagaagttcctgaaacttagaagatttgaaaggctccctgcaacattgtatcaaaatgagcagttgctggtgggagaggctggtgagttgccacctagaccagggtagcatttttggtgacatagatgtctttgactcatctgagctcttgtaagtaagccagtaacccatactcctgaagataatgtcagtggaccaacccactggttcactaaactagatttgggaggaactgtttctgtggtgttttgttagtgccctatctgaggccaatagacatttgtttatatctccccaggaaaagccacacaattccattacagccatgccatcttttactggtgtaatggggagtgctaatagtataaagggggtcatcagaagtctgaacattccacctgctgctctgggaacatctgggtattttctcttcggtatatgcctttctccttatgtgcaattgttctctgtgaagcagattatatatacctacttctagtgaattggtacttgaaactatgtctattttgtgttagtaaacaatgctgggggatggatcaaatagcaaaacccgtgtgcaaaagccagagagcattctgatgtcatctgaataagttatgatccaaagagactggaagactataatggaatatagaattccaattggtttggaggcacatggaaaaatacatgtattttaacagccaaagaaatgtaaactcactctataggcattagagaatgtgtagttggcatccagggatgtggataatgtggccgccttgcatagaattgcggggcaattatcccgacggagttctgagtatcctactcatgctcccaacaagaggtaatcccagcaagggaaaaataataggaaagatagtgttgtgccaaggaaatgttactatctaggatatggtgtgtgtgtgtgtgtgtgtgtgtgtgtgtgtgtgtgtgtgtgtgtgtgttgtacacatgcctggtgcgggtgaacttgcccatgtaggcaaatgtggacgtgagaggtggatgttgagatggcttttgtctcagttttctctcagccttatttacttacctgttgaaacaaggtctctcacgaagcttgcatctcaccatcttggcaaggccagctgcccagcaagctccagggtccacctgtctcaaccttctagcacttggtgactcatatgtgcctggcttttctgtgggttctgggaatctgaacacatgccctcatgcctgcacagcaaactttggtaaactgagtcaactttccaactcgtaaacacttgtcacagtctcgagaactgggcctcttaaatttgagaggtgaggcttatgcctccattcaaaaaaggagagaacagagaaaacactttcaactgaaatcctgctaaatttatagaaccgagactaagtgaattcaagattcatacccgcacacgcacacacacacacacacatatatatgtatatgattgtaagatttatggcaatgtttgacatacttgagaaggcctggcagacacacaatagaaggatgccaactatataacaaatattaatctattcaaaaacatttgatcaggtctccaaatgggacgcaacattactgaaaggcctttccatggtggtggtgaagatatgccaaacctagaaaatgaaaaactaaaaattgtggagggaaatccctagactttcaggtagtccccatcattgccaacatcactgccttgactcagacatgaggggccttggcagagtagcgactggcttccccgtgttcacaacgtaacacggcagagctaggatttgaacaccggtctgatgaggaggttggaggagcaagtgagcactctgtcatctagctcctaagctccctgggcgacagaacaggagatatctgaagatggagagtggcattaccctctgacagtcagaacactgagggctctagacatgtagctccagcaacgacacacttgatttcattttatagtcttgcggggaggaggcttgaatttggggtacatgtgttgtaccatttagaccttacaacagcctcaaagagcagtcagttatttctaccccatttacagataaggacactgaagcagtatggcactgaacacagcaagtaagagctgtaattcacatgggcctccaggtacagtcaagtttctcttgagctcacagacctctccatcactgtggtggctggctgttcctcccaagaagcaatatgcatgtttcacaattagacagattcatttaaagctgctcatggtcgtgcctaccttaaaaaccagcacttgggaggcacagggcaggtacatctctgtgagttccaggacagccagggctgttacacatcctgtcttgaaaaaccaaaaccaaaccagaaaaaaaaataaaaaaataaaaacaacaaaaaccaaaaccaaaaccaaattcatttagaagacaactcaccaggtacaattcagtcactcatctaatatttatttattaactactacatgcttggtgtgtgtgtgtgtgtgtgtgtgtgtgtgtgtgtgtgtgtgtgtgtatcatgcacttgcctctacaacatggaaaatttagtttctctatcatgcacattatacttgtctgtcaagatgctacccagtaattcccagctaacactagttctcagggtgctcttacttcatcatgaggttgactggaacatcttttcgttgcaaggtgatgagattttcaatgaacttctctgtcttggtctcattgtagatgtgtgtggcctcggggtgtatccctaagatttcgggagagtcgtcatctggtagggactggataaggtttatgcagtcctgtaagcttgcagagttgggcactggctggtatatctgaaagtcgagttgctttgttagctttgcgcaagacatctactacaggtaacccatgcagggagcatctccttaccaccttttatacaaaaagctcttatttctatatagtacagacattctattaaaagcaacacttgggaccactccattgcaaactgtatgatacacacatgctattattttcttgttgggaaaggggggagccatttacaggctaggggattctcacctattgccttgatgaaatagacccataggtaagggaagcatagggcctttagtacaacctgtagaagggaagtgaaggagactaaggcctgtgtcagaagtgtggtgaccagctgtatccctgagagagggtaaggctcagagcactgtggtgtgtcactgaaggacatgttgcgatgcctaccctgcccatctttgtttcctggctgccatcagtgagcaccttgcccctgccacatgccccgtgctgaaacaggccaaaagcagcatggtcaattatggattgaaatctctggtaatacaggccgaaaataaacattttctcctaaaaattgtttgtcttggggctggagagatggctcagtggttaagagcactgcctgctcttccaaaggtcctgagttcaatccccaggaaccacatgttggttcacaaccatctgtaatgagatctggtgccttcttctggcctgcaggtatacatgcaggtagaacactatgtacataataaataaatctttaaaaaattgtttgtcttaagcatttgtcaaattatagacatctgtctagtacagatattaagaataaatgaccagtgcccaggaagagaaatgcatatatggccaggaagctgtggtagtggctttcactgaagacctggtgagggacacaggacacactagagaacaaagtcactggaaaagactatcagtcaaagaaactaagaggattccagtgcataggatggactggcaaggtggaatgctcgtaaaggtttcagggttttaaaacgattgaaatgtaagatgtcagagtatacatttttgttaatgtggtctgttgcaatggaaaacaagctgtatgtgtttattatgctactttatctcctgtttgctcacacacattcagtgtgataatctgcacacagaagccaaacacactacacttactgaacaattttaaagggttttcaagggtaattttagcgactggcttgagagttgccttaggatttctattgctgtgaacagacactgtgacaactcttataaggagaacatttcattggggtggcttgcttacagttcacaggctcagtccattaacatgctggggagcatggccgggtgcaggaagacatggtggtggtcacatcttgatcagaaggcaacaggaagtggactgtgacaccgagtgaagtgtccaagcctgtccccacagtggtacacttccttcaacaaagccacacctcccagcagtgccactccctatgatcttaagaatctaagctaaatttaaatgttcctttaagtatttaaaagcaaacagaggctttcagcacccagtaagaaacagctgcacattggctggcatgcaccagctggtctgtagatgcttctgtcttttgttggtcagtgtcatcaacaggctgctcatacacattgttttggtgacttacaaataagtttccctcaagaatcattttgttcatctttctgtatgctcaagatgacctaggtctgacttctacccctcttgcagccctgggctggtccagagcctcatccttcccatctcttgtccacttacctctccatgtatcatgccccctccccaccatgggtcagaggtcacagcaaacattcaacaaagtacaatgctggtgtctgatgggggaaaagtccttctgtgtatatgtttatcttattggttgataaataaaacactgctggccaatagggaagcaagataggcaggactaagagaaggaggattttgggaaatgtagtaaggagggtggccaggtgatgccaggaaggccagtgcataaggccggtgtccttggtaagctaagtccttataaaaatgtatagattagtagttatggttgataattaagactgagctagcaaataaatcctagtcattggccaacagcattgtaactaatataggactctgtgtgttatttgggggcccaaagtggtggcagaactcaggcagctggcggaaagagttattgttacaggtgtctagcctagagctctgcctacaaggtagaggcctacatggaggacagaagctaagggggtaaggaaagggaacactgaggagatctggcgttttctaccttggatgcttgtggcagagacagagttcctgcctgtcagctttgccacacattggtggtgtgtgtgtgtgtgtgtgtgtgtgtgtgtgtgtctgtgtgtgtgtgtgtgtgtgtgagtgtgtgtgtatgtgtgtgtgtgatgtgtgtgtgagtgtgtgtgtgtgtgtgtgtgtgtgagtgtgtgtgtgtgtgtgtgtgtgtgagtgtgtgtgtgtgtgtgtgtgtgtgtgtgagtgtgtgtgtgtgtgagtgtgtgtgtgtgagtgtgtgtgtgtgtgtgtgtgtgtgtgtgtgtgtgtgtgttctaccctgtggccctcagcttccctgcctgtaagctgggcaaacagaacctttgacaaccaatgggaaacacacacacgttggctagcatgcactctgtggtctgtatgtgatgcttgcttctgcttcctgatactcaaggtcctcagagggcagacaccattccttaccattgcctgctatattctggcatttaatagaaaaatgggaagtggagtggtggtggcacacgcctttaatcccagcactacaaggcagaagcaggtagatctctgagttccaggccagcgtggtctacagagtgaggtccagggcaaccagggccacatagagaagccctgtctcagaaaaaaaaaaaaaaaaaagcaaaaagaaacaaaagaaatgcaacaatgggaagttagtttggttctggaaggtaactcaagtaatcaatgaaatttggttaaacattgaaatttggttaaagacataggatgcaacaaaacctagttaaaaataattaagaagacacaccctttcttacctcatcactagagaaactgaagccagccttcagcatttcaggattgcagaatttgttgaaaagggtcttcaggcattgcttgtcccatttattggtcactcggccaccataggtcacttccccaatcaggtagttcagttccttccatggaacttccgatcggccaaggaggacgcttcccaggacctttatagaaacctgtgggaagcccactgtgccttgtgatttctgcatttactgacatttcacacaccactgccaactctcaagtgaccagtttctctcggaaacagaacgaagccagggtacaatcctctaatctcaatttcccaggaggctgaggcaggaggattataaattcaaggccagcttgggcaacttagttaagatcccgactcagtagaagaggactgggggagctgaagagatagttcagggatgaagagctgctcttccagaggacctgggttccattcccagcacccacatggaggctcacaactgtctgtaactccagtttcaggggacctgagccacagacaaacacacaggcaatacatccctatgcataaaatgataatactaaaaaagattctgggatatagcttagtggtagagcacttgcctactatgtgcaaggtccaaaggtttggtccccagtgctggaaaaccaaccagccaaccaaccaggaacagagaggagttgtctcaggatacgtgttttccccaccagtgactatgctgctactgagctacagccccttgtaactatggttgctgctttaacagacctgcccagggcactggacgccagggcacagaaggatgcagaagggaagtgctcccttcccccaccatccccactccccaaccaaggcctaaaacagcaggttcttggtgttctgaaaatgaccttgggtggtcctcatctctttcccttctcctcccctgtcctccggaagagctgtacatacacttaagtgctcttaagggtggagccatctctccagcccctcattgcaaatactgtctgaggcctgatacttgtgtgctagctgctttattacagtttacaaccaaatatgcctatgtcttacagttctgggtttccagctcttcagtcgtccagtactctccccaattgagctgttttgactctgttccaattctggggttctaatttggattaagttgtccccaactccaagactgtatacagaatctcctagattcacttttagagatttgtgtggctgtaaaaatatatttagcctttcttctagtatgtcaactaatagagtgtaaaagacaaagggcctagtcattttcttccagtaggatgcttagttgtactggtattattcacaaaaaagacccttttttttttctgtgttgaaacacttctgtgtcatatgttaacagactgacctcataggtggtggagctggaagggtgttgaaagacacaaggagtagagtttcattggagggaactttggcagtgaattttttttgggggggggttggctggagagatggcttaagggttaagagcactggctgctcttccagaggacccaggtttgattccaagcaaccacatggcggctcacaaccatctgtagctccagttctagatccggtgctctcttctagcctccctgggcacaagtcccacacatggtacacagacatacatgcaggcaaaacatccatacacagtatatcccatagattaaatacaattatgttaattttaaaaatctatagagaattggatctacttctgcattctttgctgagtcacactgacttagcttttctgctaaaccatttacctcaggttagtggatttttagtgtattttgatgtccagtgaagaaaaaaattccttcactattttttatttttgagtgtatttatatagcttattcaacatttcctgtttttgtgaattttttccaattttaaattttctaaattctaattgtaacttcatgctatatgtgacagttaatgctggaagaatggacagtttgctatgtctgaagtctctggagaacaggcatgtgctaggttagagaaagcaggagagaagaagggaatgttgccctcgtcactgtgcaacccaggcaaacttcccagtgctcttctgggaactggggacagcgagggcactatctgtacaaagctgtcacaagactcccatccttttcagtgatcagtagtcttgttctttttcttcccaatttatagtgctctttatgcagggctgtaaattttttattttgttcccatatagtttaaaaaaaattctttttaccactactattatgggtgtttattgctagagaaaatctatatatttaacattttccttggcccttttaccaattccctactcctagtaaagcctcttttaacttcttttcggtagtgtctaagattttcaagacatacaagtgttcttcaggtaagcagcctgaggtggcctacctgtgaagatgctattctcttgacccagaaaaccctacagaatcatgtaaatcaagaaatccccaaactgtggggatggacgcagggtcggtggccaaaaaagaatgctgaatttcttgctgcatgtgcttagagatgcagagagcaacgctggaccaagggcttagaggtagattctctggtcattgaacatccacgtgaaggcagcacccaagatacgctgatgaatttacagtttgtggctggattaacccacacatgagctcccctgccacactgaggagatcctcactaaaaaggaacaaactgttccaaagccggaagaggagggtgcgcagaagaaaaagacatcccagaagaaactgaagaaacaaaagcttatggcatgggaataaattcagcataaaataaatgcagataaaaaaaaaggcacaagtatgttattcactgatgtgctagggagcaggcacaggaccttgtgcacactacatttaatgtcacaagtgtagcaatctcttcattttgcttcatgatatttgtttattatttctcttattttttgatagttttctcaagttgttacttctttccagttttcttctctgttaaattgaagacataatgggcaggctatagctctgtattctagcatggcactcacgcatgagatcccaggaataatgagctttactgtgccgtgtgtggcttcttgtgagggtggagacgcctgatggatacagagacacaaaagaatggaagacctcctgcccagggtgggcctactgatataggtacaaccaagactttcctagaaaacaaacaatccccacccccaccccccgaacaaaacaaaacagcaacaacaacacaacaacccagaaacagcccaacattctaacaccagaagccaactgcaaggaaaaacttgggaatttcattttgttgttgttgttgttgttgagacagggtttttctgtgggtatggctgtcatagaactcgctctgtagaacaggctggtctcaaactcagagatttgcctgcctttgcctcccaagtactaggatcaaaggcgtgtgccactgctgcccaacaactttgaaaaagtttaagcagacattattgtcctttctgtctgttagcaataaagaaaacatcccaaccggctggtagtggtgcatgccttgaatccttgcacttgggcggcagaggcaggttgagctctgtgagttcaaggccagcctggtctacctagtgagttcctggtcagctaaggctacatggagaaaaccctgtcttgaaaaaacaaaacaataaaaaagaaaatatcctgcccaaaagcacaaggtactataaaaaagataaaaagataataatctacagaagattattaagttgccaaaccccagtgacttagggtaatccttcttgctttaaatgaatatttatagtgatttatatgtcaggaaccgaacaaaatgtttcacctatattcactgagttgtgcccccccccttttttttaaaaagatttctatttttatttttttacgtgtatgggtgttttgcctgcatatgttatctgtgtaccacgtgtgtacctgatgtccacagaggccagaagagggcctcatatcccctgaactctagttacatgtggttgtgagccaccacataggtgctaggaattgaactcaggtcctctggaagaacagcagccagtgctcttaactgctgagccatctctgcaggccacggagctgcatcttgtaatgactccatgggtatgtacttctggggttatctgactgtctggaagaggaaatcatgtatagcccaagcggaggggctgacactgcattccagaaagctgactctggagtccccatttcctagttacacagtgcattttcttcccacctagcagcatgcagacgcagactagcttagctcagctctctgttactagctcctgcctgccttccagagcccacgctcaccgccaagtctgaagaactgaattgataagggacattccagcctagtgttccgtaaattttcctctcattgatcacagcattgaagaaacagaggctgaagagaatctttttccaccacggtccacaatcattcttatcaaatatctcttctgttacttctccactccctccgtatccaaacgtttgaagtaaattgcttttcaatccctggggaggctccacagcaatctgtaaaagaaaagggagtggaaatgccaggtggctctaagacgggaacacgccctggtgggccccacttctcacagcactggtgacgcacatggccaagagctatttcccaggaccactgccaagtccaaatctaggctatttgttcatttgccctcttgaacatcctctgtaaaaggattcagattttctatcaccttctaattcatattttaattttgagacctggtctcactctgcagctgtggctagcatggatcttactatgtggctgaggctggccttgagctcacaaaggtctgtctgtctaagtcatattttaaagacaaaccacagccctggggtggtaactgttactgtgaccacaagcatagtgttcgggagggacagagtttgctggtgtgctccatcactgggagctaaggccgtggcaagggaaaggagctgccagacaacagccaggtagcatacacagggagccagaccacaggaaataggacatagccaatcacattagaagggagagtggtgactttgtgttattgaattccgattgccttgagaatccaagctgctgcctgcttcaccagagtagctgagacgattaaatatgagggttttattatgtgtgcatggctgctagtctgagatagcaagcgtcttaatcagtacctgcttacagtgtgtgtgtgtgtgtgtgtgtgtgtgtgtgtgtgtgtgtgtgtgtgcgcgcgcgcgcgcgcgcgcatgtgagtgtatacacacaagctaggaatataattgatttaaacattggcaaatagagtgccttgtgtaattctatgatgtatagtacataaatactgcgtggctatgcaaatacattatatggggaagtgtatgtgtgtacatgaacatgagatttcttagttcaagatcagacttattatttacgtgtgactcatgtcagggggatgcagtgggagtcatgtagctatgcatgatgggacttcaagatgtcacttgagcatatgcagatggctggcatggtagcccctcttggtttacagtaacagggagacttttccttggggaaggagggaggtctctaaccatggctctgttttgagataggcctggagctccctatgtagatacagatgaagcgggcctcaaatttacagagatccacctcctgccttctctccctgatgctagggttaaaggcatgcaccaccgtgcccagcttgatagatagtgcaattagagcaatggacctaatggaaaacaaatgtccttgaaactctatgccctctttattcctactgcctcccaacttctcctcctggccacaggcaacaggccactcgtggtcatagtcagcctggtcttgggaagtaaacagggcatctgaagtcacaggctgaaagtctcttgggtttctctgtctgctccagggcagggctgctgggaagtgactctgggagaatggaagcagtaaggagcagtggtgcaggaaagcccttctagttttaggaatgctgactgagtgtgccctgcctgtgtcttcactggtttctctgtcatttgaagtctgtctttaacaggacgaaccacgtcttcattgttggaattcacaattcagacaaaatccacaattaaggctagtttagcaaacagtttgttttccttctgttagaactttccagagagttaatgagccatacagtggttaagaggaacagaaataagaaaatgccacacagttgggtgtagtggcacatactcaagaagctgaggtgggggatcatttgggctcaggagttcaaggccagcctgggcaacatagcaagacagtgttcttgaggggaaaaaaagtagaaggcataaaggaaaaagctatgcagatgtgtgcatcttggttttcaacaactggaagatgagcatcctttttgagaagcaagtgtcagagctgggagttattgcaagcaggtctacacactatggtagcatcctccctaccctgcaaaagctgacagtgagtacaccatgcatgttcttcttaatttagaataatgagggatgatgcttgatagtcaagcaggacctgccagtcaacactgaaatcctgccagtttgttcttaccttcacacccttctgaagaataggaattgggaaagaactatatgattttgagcttaaccaaagcctaaaatcagggtccatctccatatctggattactaaatctgcaaaataaaaatgtaaacattaaaattttgtgcaatatcttctcagagccagaacattttaatgtttctgtgaccttacggatcatttcaatgccaaagacaccactcacaacaagggctttgatggtgtacaaagaattgtaaaagatccatcagtttctattccccttaagttaaaaaaatcataaatacacaaacttgagaaaacttctgtaacatgacctgagcggaagctaggtgtggcagtgcatacctcccactgggaaggaagtgggggtcacaagttcaagggcagcctttcctacatagctatctcaaaaagcagggtggggagtgggcaggtcaaactgggatacctgaacagccaagtaagtgacagtaggacctggctaaatgaaatgaatgcaatagggcagcagaaactttactatcttcctagtctgcatggccagcatgtggggtgagggtgtggcggtcccatcttgtcattcttctgctttgactgcctgaaaggaggcttcagttagactgtaactgctcaacttagattcctaaagtctctcctaagacagttggtgctattctcagaccgttactcttttagcagtttaaaaactattgagtgaaaaaaaaaaaaaaagatgacacttgtgaaatcacccaagagtcagaaggcaaagattaattagtaatatggcatttaatagatgcagacctgtggaacataagtggctcaaacatttctaatttcacacattgctgactcttccctcatggtgagttatagcaattgagcgtcaaaatgcagtcaacaagaaggctgagcctctggaaatcaagtgtgtcagtgctgtggggagtgcagccttgaagtgattccagctgggggaggtcggagcagggtaaacataggccataaagggaaacactgttgagggctgtgtatgaggtcctgtgctaaataaggatgaaaatgccatctaaataggtgtttaaaaggaaaaaagaaaagtccgtgtgctctcaggacagtcatcagggcagcggtcagggcagctgagggttttctagtggccagatacatggcttccgctttgctgtgcacactatgtgttgctcttggcagtgtgacttcacagtgcggatagttagtttaaccctggacagacagacgtggacttacgactctatgatagcgcagagtcttggcatgaaggatgctgcaaggtggcagttctggaggaagacccactgattcttttggttcatagcgttaaaaatgagctcttctgctttggccgcctggcctcggcccagggaaatcatggtcacctttggacttgcttcttttaactcttgtgcgaatcttaggaggatattgttgaggtcaatccctgtaggacatgcagaggtgtctcaagctgtaagctcacttggttccctcagcagatgcaagcctgcgcttactgctggggtggtgggagacgatacagcggcaggagaatgactcaggttttgaagtgaaagcctacatttcaaagtgtgtccccaccacttgccggcctgtgatacaagtttcccaacatctgggaatggtagctccttatgagcacgactgttgggctgtcatgcctgtgtctacttgtccctttgtcctttggtaatggatacaacaaccgctcatgaaggctgctaacccagctaaaacaccatgttttaaaacatgatgaagagaggtgtgggaatggagacttggtgcaggggtatcagcagcaaaagtgtgtgaggaaagggtgtggtcaaaccttagctatctctccttgagagaggactgctgttgacttgagggctggccagcggcctgctgccatgcaggaggagggcagcatctttacaggtgtcaggtacatatctggtacaccatgatctggcagatctggtgagaagacccaaggagagacggtgcccaggacaaagcctctgcctgtggagtctgagtagggggagtggtgaattctaaagacacattgacttggagggtgtggagctgaggaaaactgaaaggaggtgctatccttagggcccgcagagctaaggcaagggacaggggtgggagtgtgtaggtcagaggtacacagcccacttctgatagttgcctttaaaaacagaaaccagacaaagttttttttttttttggttttttgttgtttttgtttttttctgagccaaatgtgaaggactatggcttaggaactgatggacatgaccctaacaaacatgttccaccacagaatgggataggacctctcaaagatcactgtgaatgcaaacagtcaataaatttaagggtggagccccaacttgtttttttttttttatgggcttgaaaatagtttctacaaaaaaatgaactctaatacattttttcatcttgatttatatttttagaaagattcatcctgcatatggtttaaagttaaaatcccttttcaaagatgttagaagggtacgaagctttaaacagaataactggacacaggctctgtttctccacatccccttttttggctggcatgggggagggaggtggtgttttccagataaggtcatgtagcacaggctagtctaaaaaacattcaaaacagaagttgatctcgaatctacaatcctcttgtccccactaaaggagtgctgggtaccaccctgagtttacggggtgttggggctgtgcccttggtcacaggtagctcaccataggagtgaatgaggatcagcggtgtctgagctgtggactctttatagtattctttcagattaactgtagtcttgtggatatattcacctcccattttttcagttataaacttttttactgaattctctaaacggtctggccgaagaattttaatctgaaaaatacaatgaagacaaggtaaatttaaaatctacacagaggactattcccagtggtaaaaatgaagtgttctggctctagccagagtttcctgaagtgctgttaacaagacagcaggtggggtggggggcactcctgaccattggttggtgtggtggtttgaaaggaaatagtccccaaagggaatagcactattaaaaagtggagccttgttgaagtaggtgtggccttattggagaaagtatgtcattgtatgtcactgtgggggtgggctttgaagtctcctatgctcaagataccacccattgtctcagaacacttcctattgcctgccaatcaagaagtaggactctcagatccagcaccatgtctgcctgcacaccataatgatggactaaacctctgaactgtaagtgagccacaattaaatgtttttcctttataagagttgccatggtcatggtgtctcttcacagcaatagaaaccctgactaagacagttggtttccccctgtccagctaccttgtgttcctacgaagctcttccctactccacaaagagagcttggtttggctacacaggtacacactgtgatctctggctttgaaaaaggacacttttcctgggttcctcctgctctgctgtcatctctatagcaagaagaacccatatagtgtggggttagaagatgcaagataacccaactggaagacaattaatcctccattcagaagacaaaaaacaatgtcatagtctgtaagtttaagtgggacagaatacagggctgggagagctttggacatgtgacccatgttgggcacacatacagtgcatggatagtggacacagaacttccctgtgaagactgcctcatacatcctacttacatgatacatgtccacatgaggaccatgaagtgtgttctgggaaagtccagcatccctgcatagagggcaagtctgaaactgtccgagaatggactaggcaattctattactctagagaaccctgactaatacacccctcttttccatccactgaccatggaccgaaaagccgctgaaattcagcccaaataagccttataagttgattatcttaagcattttgctaccttaacaaatctgactgatatacacctaattccatcctgaatctcctaaaccccaagccagattctaacacgactgagaggttggagctgtgtaaaatgctgccttcgagagtaccacttggctgaatgtggcttagctgttgagtcactcacatggcctctggacattaaagacaggaatcagacctattacctgtcataaccagattgggtagccattgctgtctccctaaaggacagggcctctccttgtaattttagcccagaggagaagggcagaaagtgagcttgtagacagggcgtatctcaaaagaacagggagataatggtggcactgggcaactcagttcatccctcaaggcttcgtcttgtctacaaaggatgaatgtgggggggcacaggaccaccctgtgatgaactattagggtgggatgctggtgcctcccactacaccaaggtacagtaaatcacagcttgaagaagtcagcatattttgcttataaaattttaattttgaggggttcaaactaccaataaacttacttgaaatacttagaatcataatcttttgtcttagttcatcttaccaagataagtctttgaaatggagtgagtttttcccaaggaaaatttaaaggtttaaatatttcatcattttcattcagaagttcaactagatagataccatcaagagaaagagactgcaattaataaccagacagcggtgaaattcagtcataaaaaagaaatacggttggctatatttaggataacttattagtaagtgttattcctaggatttggggcattgatatcctttaccatgaagcagacgcaggcccaaatgatgtgaacagggatgtagccggcaggatgcagctagggacataggaacagagctgcaaaaactgaaggagaatgagaagcagaggaccaggcaggccctcagcatccgctctctcaagtgagctccaatgtatagttgagagatttttactcacaacacctaaaacagatggggaggtaagaactcccagaagctcagataggattaccaaattttgagaatttactcagttatttaatttttcacactgactcctctctctgtggtgatgcaggcttgcttgcaaagtggggacgccctccaggccttatttccagccatagctgttgttgttcctaatttcattgcttccctggtatttccccaatgactaaactttacatacaacttggattataaagcaaatatatattttgatttgaaaaaaaaaatcccacgggtatgtgtaaattcaatcacaagtgataaattcggagttatttgcaaaataaaaagatcctcactttacaagaagggttaaccgagttcctttacataaaagttattgatttttgccctctattaagatatagtagggaatacagatatttagtgataaatgcaaataaatgaagaaacagtgatccacaaacgaaagtgcatgggtgagtggggctttttcattacaagtggacaaggaaggaggtagagaaaatagacaaaactcatgaacatcttgctgcctgtatgctgcagtttctatcaacaaataagtgataatcagatttagaaacatacacaaaatgactcatatacattaatagtattcttatgaacaatcaaaatggacataagcagttcatttaaaaatgaataaagtatatgtatgaataggcagatcaactcaccgatagtgctttagaagatactaatacggcaattaaaattgaagtattttgaacttttcaggttggtacaactcaaaagagatcaagccttccgttagaaaatgggcagttgggcgtgagagatgactcagtggttcagagcacacactgctcttccagaggacccaagtttgaatcccagcacccacatcaggtggctcacaggcacctattagtttgagctccaggtacctctggcctctgtgggcacttgtagtcatgtgtatatacatgccttaatacacatatacttaaagataaaaaaaaatattttaaaaggctaggcacgcacactgctggtgaaaatacataattttttttttttttttttttttttttttttaagaaatcaacctggcagggacttctcacatgacaagtgtttcctctgttcggtatttctacttctggaattctctttctgacagagaggaagtatgtgtgagaatcctgatgctataggaataccttatgtgcataagaacaaaactctgcaagcacaaatggagaaaaatgtggcaggaaacaaactaggctgtgtcccaagtagggcatttcatagtggaaaggacgagaaaaaaggaagtggggttcaaagcagaaagagaaaaggaaaactagacaaacggcagctcctgaaagatctgtgtgcgccagcctgtggtcacgcacatctttaaacccagcactcaggaggcagaggcaggcagatctctgagttcgaagccaggctggtctacagagtgagttcaggagccaggactatacagtgaaacactatctcgaaacaaacaagcaagcaaacagatccatttcctgtgtagtccttccctgggcttgttatgtttttcatgggtatctttttctttcttttttgtggttctggggattgaacccaggggccttgacacgttgggcaagtgctctcccactgggctgtatgcccagctcctgtgtaacttttagaacgtgtctactacataaaatgaggggcctgtgaaggttccctcagatgcaaggttcagaaccagtgtgctataatgacaggccgacatacttgatttttccaaagtccagaactcacacaaatttctcacctataacagtgaaattcctaaaaaccacttccttattgtgagaatggcattgactcaaacatgccacacagagcaaacatagcaatgcccctctcctcattcccatttcccccctttcccaacatctctggtggtcccagaacttgctttgtagaccaggctggtcttaaatgcactgaaatctacctgtctctgtctcccaagtgctgggattaaaggtgtgtgcaccaccgccctgctcttttttttttttttttttttttttcaagacaaggtggtttctctacgtagccctggctgtcctatagaccagactagccttgaattcaagagatctgcctgccgttgccctcaagtgctaggcatgcctctcaggatctacctctatacattgaaaatccacacacacacacacacacacacacacacacacacacacacacacttattgaggttaggctaaagtgctaaggtccctaccgtcttgtgacgatctgggactttgcagaggtaaagcctcttctgaggcgaagggtgtgctcattagaaagtacacagccttagtgtccctaaaggtgttccattgctgctcgtttgacaagagcgatctgcagagaagggagaatggctccatctggttgctgaggtactggcattgctcccatctcaggtctgtcacccattgaagatgctccttcctacgtatttcaaatatacctgagagagaagggaaaacagtcgcaggagagagaaatccttcaccttctggtgacccattccagagtagataattgacaagcatttgttgttgagcaaagagccacttcatgtaaaatcagctggaggggctggggccatagctcaacaggatgcttgtctggcatgtgtgagcccatgagttctgtccccagcatcgcaatgaatagacagacacattaactagataagcttgtgttatgttgtttcttctagaacaaaactgactatttaaaccattttcagcacagaactcagtattacgtacatctcactgtgtaaagcagatctccagagctgttctgttcccagacacaacttctctttcctttgccttcctccgagctcctggtggtcaactatctatttttatgaactgccttcctcagacacctcacaggagtggtgtttgtatttttgtgactgtcttatctccttcaacaaatgtccttaaggcttaaccatgcagtaatgtgaaatgggacttcctttctttcaaattcgattccaatttaaaatttggaattttaaacaaaatttatgtcaaattttgtttacccctccattgattggtagacacgcagctgcagacacccattagcttttgcaaatgtgcagctgtgatcgtggccgggcaagtgccttccagatttgccacaatcttttggatgtatacttggagtgggattgctggatcatttaataataatttaataatttaatgttttgaagaaatgtcattccatttttcatatttgcaattccaccaggagtacataaacattaaagatatcacggccatgccaagggttcctcacaggtgcatgtgtaaaagggtggccttagccagttgctctgttctgggaggtttggaacctagaggaaaggggatcctggtgtggtgggtgggccttagaggtgatgatccacttctggttccagcccaggctttctgcttcctgatccagtgtgtgaacgagctgtgttgaaaatccctgccctcatccttagacaaatagcccctgaaagtgtgaacctaaatagttccttctttcctgaaattatttcctttaagcattcctgtagtactagtgactaataccagtgacataaactttttattacctgtaaggattttaataaaaaggtgtgtgtgtgtgtgtgtgtgttcatgaggatgtgcttgtatgtgtgtatacatacatgcagtggtcagagatcaatgtttggtgattttgctcagttactctccatctctgtttttaaaactgcatttctcagtgaactggaagctccctgagtggccccatcagcttccagtggttccaagcaccgatcattgtacccgttttttaaggtgggtgcctcaaatctaaacttagtccttcatgtttgcacagaaggcaccttaccaactgagtcatcatctccctggccctctgctaggacttttatagtttcagggcttacatttaacccatttagatttaatatttgtatttggtacaaataaaggtccaacttcattcttttatatgtgcttatccagttttcctaacataggttggtgattatttgaacacaaatgtatgtgtaaacttgtgggatctttattctatgcccttgactttttaaaaaaaagattttcattttaaaatggtgtgtatatgtgaatgtctgcaagggagaatgtgcacatgagtgccattgcccacagagaccagaagagggcatcaggtctctttgggctcgagttataggtggttgtgagctgcctaatgtggatgctgggaactaaacttggtcccttcttcaagagcagtatgtgcttttaaccaatgagctctttccagctcctcattttgtctgttttttatgtgagtataacctacttgtttaatagcaatgcagttttataacgtgttctgaaacgagaaagtatgagacatccactttggtgatcttttgaaaagcagttcttgaggtagaaatttattttgttgacctgagatctttatttttattttttaaatggtcggtgtgcgtgtctgcctgtatgagggtccgtgcatgtgtgtgcaggtgctggcaggcattgcatctccatggaactggagctataggcagttgggagctgcctgacgtgggtgctaggaactgaacttgagtcccctgtaagagcatatatgttcttaactactaagccatgtctccaatcctgagagctttctgtttttatatatttatagtcatacatttccctcttagcattgcttttgctacatcacagaacttaaaagcttcagtcattgagtgactgtgtgttttatgtattgttctgttgctgtgaagagacatggtgaacaaggtaactcataaaataaagcatttaattaggggcttgcttacagttttagagggttagttcatggtcatcatggtaggaagcagataggcatagagctgaagcagtagctaagagctttacatcctgatcaccagacagagagagaaagagatgctgggcctggcatggactcctgaaccctcaaagcccaccctgagtgacacagcttttccaacaaggctacacctccaaatccttcccaaacagttccactaaggactgagcattcaaacatacgagcctctgggtgctgtcctcattcagaccaccacagacaggcatgctttttggctcaagttttcaatagtaagtgaagaacattatgcaggaaggggcctgatggcattgtagtcaatgtgggtgtccctagtcactactgataggtaatctgctttatattaggaccaccataatcttactagttgtgatttatttactcattcagtcactcacaaaaatgacttaggaggatcatgagttctaggctagcctggctatatagtgaaatgttttcccccaaacaaacaaagaacatgctgactgcatgttcacacatttgtgagtttgacatagaatttgacctcaatcacagaagtaaacctcaaaatcatttagcattttacaaggaaacatatgccagtggcttaaaaaaaaaaaggaaaacatatccagagaaattatttttacttactattcaatctagtcttggttagtatatttctaatatttgtcaaaaggccagagtataaaaagatgttccattcttcttctggaaggaattctatgtcatcatcggccacccgagtgtcactgacactatttctcatgattgtagtgcaaagccggaaggagaagcagagtttatgctcattgaatagagctgaagaggccgcctgcagaaaccacaactgttacacaagcccgagaggcagtgctggcaaaactcatggtaaaaggacagcttaccttaaatatgtttcttgtcaatgtatctattacgtctttactattcttggataagggagttctcctactttctggattctgttcatctgagatacttgaagaagtctcatcatcatcatcatgtttttccttggatgttttgtccattttctgatcatgcttggttttggaaactgttgagaaaacaaaaacctgccggaaccactgcagggagaactggtacatatagtctacctgcgtgagactggccatcaggaagtagagcagagcgccccgtgtggctatggggaggtagctcttgcggattgcttcaatttcaccttctgccttttctgtttctttgatacgtttggaaatttcatttgaagtcattttggattttcttagggtttctacaatttcttcatcatctaatacatttcctaacaaacaaaaaacaaaattaaacaaaccattgaaatgacaagtagctgttttccgctccgggtactgtaagagtttatacttgtgggttttttttgtcagttttatgtccagttgggttcttctttttcttttaatagtaaagcagggttggaggttttcttaaaggaattttgactgaaacataaggtttaggataaagagctagaaaagagagactcaagtgtgggcatggacttcagataggtttaaaatgattaatcctaccccccccccagggtctctctgtagctttggagactgtcccagaactccctttgtagatcaggctggccttgcactcagagatccacctgcctctgcctcccgagtgctgggattaaaggtgtgcgctgcccggttgattaattaaatatttctaagaagtaggattgacagtaatcaggccccacttctcactcccttttctcaattctgtttgtgaattccatttttattacaggagcacaataggtaacaatttcatcataaagaatactttgaccttacacacacacagacagatacagacacacctacacccacagacacagacacacgcacataggcaggcaggcaggcaggcaggcagacagacacacacacacacaggctaaggatgtagctcagtggttggagtatttacctgtacgcacaagactctgggtttgatccctagccccacccctaatatcaagcatactattatttcgtgtaatacactctgctatttccttttgaccagtgaggctcattcttcaatgttatctgactgcaaaagtcttttgagcaagcaccatgttagacagactgaaattcttcccacttcaaatatatcaagggagctctaagatcttccttataaaccatttttctgtctgtctgtctgtctttctttcctctctctctctctctctctctctctctctctctctctctcccttccttcctctctttctttcgttctttctcccctccctcccttcttcctttccttcttccccaccccctttcttgagaacaagttttgctatgtagattaggctggcttcaaattcagtgatgcaaatgcctctgccttccaagtcctgggattgaaagcatgtgccaccacacctggccttttttagttacatttttaaagaactattatgggtgctagagatggctcatccatgaagagcatgcattgctcttgtagaggacccaagtcctgttcccagcactcatgccccattcctagcatcaacattgcggggctcaaatctccctagaagtccagctccaggggatcacatattgtgtctcctaatgagacacaaattcaaacttgaagacagtttagggtcagataaactgtgttttctccccagttgacttaggtgtagttgtatcagtgtgagccaggaagaagttgacataaacttatgttttattgctacaaaaatattctagattttcttctagcaagaggagagcaattttgacttctttgctaataaatacattttaatgtgatatctaagagtcacatgacattttctctataaaaggtcctttaggatcaacacttggtgaccctaagtgtctgtggccagctttgcatgaagtagatgggagatgcctggagaatgaagatagcactggcaggagtcaatttgcacccccacccctgagatttgcttaaaattttaggtgcagtgtttggtggtcaaatgtgtatagaaggaactaagtaaacatgggtaacaaggaacatcaaaattcacaatgtgaaacttagaaatgggtgggactccccatctcaactggctatatggtagtaacggggacttggcattttgggtcccagttcagaaattagctcattttttcttcttctgactttcacttaagtctcttgaacatactcagtgtctctcctcaccttttgttttctggagtaaggtcaatgttttgtcctccagttcctccagagttacagagtcaagagaaatactctctagtaactgagcgcgttgattttctaaatgaggaaattcctgttttattactgtagataaaagctgatcttgcaagctttggaatgttaccgtgaagttgataacagtaacaaagttataaacggatggaaggaaatgggggttgtctagttctgtgaataagtacaacctaaaaatgagaaagagaccagttagtcaaacaacttacagaagaataagatgaaaccaaatgtctaaataatataaactatatttttctggaagtgaaaagattcatttttagtgttactcagttttgtgctcaatgcatgttcttggtttatactatgtgcagaagtatgtgtttaatactttaataacagcctctgggtttaagcataaggccagggcctatgacaaatggtcatagagttttggggatttggagttactggactttctagctgaaaggcagcctgggcacaggggtgaggtggggtgggaggaagggcaggaggaatggtgttggcttagagcaggtagtaagaaggaatgagattctggtcttgctttgcttatagcaactaagaagagcaggcacaagtctactccacttttaaaaagtgaggctgaggcatggccagagagagtggagatatgtccccaaatctgtcttttaaagcaataccatgttcctaccttctggaagacatccattctgggaatcagttggctacaattactatgactccccaggctttgcccacaaagagacacctggaaggccttcctgggaactgtgtttctgtggccattaaatgttaccacaaactagctcttcgtgaagctgcctggaggagggcgtagcttcccactgcagccccagaggctgtgcagctgagaggagaacagaacagaagggaagcaagcctgccctggcagtttaggggcagggacctcaaaatgagcagttctgatccttgtccttgaccagaagccaggaacggtcttggttctaatggcacttctgtgttggctggaggccagaaacatcaaatgtgtttaagagtcactgttactgttctgggttcttgctttctcttctcttgaagctactgaggcacatgaactcccatgtgatgggatgagtgggtgacctgcatgagcctctacataaggatccttgatgatgacacagctttgtgacacaattttgctatatgggaactctgtttcaatcagtcctgtctcttatgtctcaccaggaacccagaataaattcctctccaaaaatcacccttgctgtttcccacagaactgagtgtttgagttcaagagacaaaggacctctaagtccactagctccagtggctttggtgggtgttgactgtctaggagcccagtcctccatattgctcatctgaggccaagaagtctctgtagttgttaaggattcccattttccctcctagtgcttctacctccctgggtagaaatctttttgttctgaatactaaatatgaatgtggtgtgtgtgtgtgtgtgtgtgtgtgtgtgtgtgtgtgtgtgtgtgtgtctgagctaaagactgacttcaagtatttcccttcagtgctctccttactttctgagacaggatctctcagatggtgaggatgactggccattgaattctagggactggtctctgccttccccaagctaagactacaagtgtgtgctaccctttgcagatgcgtgttgtgggcccggttgttcatatttccattggctgagccaccacttcaggcctggagtttttgttcttttaaagtggtcaaagcttatcatgtctgtgctggtgttggtcaggggatcaaatcaaactcttctgggctaagtgggccgggcttcctgcctgttgacttcccgctcagctttggccacagtcccatgaggtacatacagcctgacaacactgataaaactcactctctgaaaatgagtgacagtcacaacccacaaaaccaagaggaatgttcatgatgccatggctgtttttcctcaggatcacagtcagcaggatggatgcacacggccttccgtgttcatgctactggatttgactgtggggtcgttacctgaaccttttgttgtactctatctcagtgccaccaattttgatgtaatgctgccctcttttctggaaaatgtccttcttcagaattgcctttaagctgggaggaaatgcttcaggggtattctgaaaacgtccgacagacagacagaaaaaaatcgtctcagaccaatcagttgaaaagacgcatggttgatgtcttccgagaaagacaggtgtaagagagctaaactatgtacatatgtgcacatatataacacacatataatacatgcatgtatgtgtaattgtgtatacatttgtttgaccaaaatcctggacactgaaaactcctccctcttacgttcattgcatataacaaggcatacactagaaagaaggaatccgactacattgtccacttacatgcaagaggacacgctctcctgcttgcatggccgttttaagtgtttggaggtaactactatcttcagcagaaatctcttgcagctgaggcccttccatctgacggatccagtagagtgcttgcttgtgcgggtcaatcaccaggggccactgctgggtacttttcatcaagatggcattttctgttgcgtgctgaccgagaggcaacccttgattatgccaccggcggatctggaaaggaaacactagtgtattttaccagttcagaaacttctgcacagccttagctcctgtaaagggtcacgaaggatcctaaaccaccattgcttttagaaaaataatccccaagaggaccaagggaacaagtgacttaaagcaaattggaattttgatcacgacactgtagaaacaggaatctttccaccaagccgcccaagttccgcctgccaacacgttaaagtcccaagtaacacaaagagtcttacattaggtacaatgttgctggccaatgactaagattttttttcttttttgccgatttttttatttgaattagaaatatgattgttttacatgacaatcccagttccctttccctcccctcctcccctaccccccccagctaaaaccctacctatcacatatcctttctgctccccctggatggtgaggccttccatagggtgtcactagagtctatcatatcctttgggatagggcctaggcccacctccttgtgtcttggctcagggagtatccctctatgtggaatgggctcccaaagtccacacctatgctagggataagtactgaactattacaggaggtcctgtagatttctgaggtttcctcactgaaacccatgttcctggggtctggatcagtcccatgctggtttcccagctatcagtctggggaccaagagctccctgatgttcaggtcagctgtttctgtgggttttaccagcctggtctggacccctgtgcacatcacttgtccttctctgcaactggattccagttgagttcagtgattagtaattacttctacttccatcagctgctggataagggctatcgggtggcatataagtcagtcatcaatctcattatcaggggagggcatttaaggtagcctctcctctgttgcttagattgttagctggtgtcatctttgtagctctccagacatttccctagtgcctgatttctctgtaaacctaaaatgtctccctctattatggtatctccattcttgttatcttctattcttcacctggctcaacctttctgctcccccatgtcctcaactcctgagattctctcttccatctcttgtaatctgttggttatgcttgcatctgtagttcctgatagtttacccagcttttctatttccagcatttcctcagattgtgctttctttattgtctctatttcagtttttaggtcttgaactgtttccttgagagatttgttgatcttatattttttggtttgttttttcttccatttctttgaggccctctatcattgtcatgaagatgtttttaaggtcattctcttctggttcatctgcatcgtgatgttaagatcttgctggtgtatggttcctagtctccggtggtgtcatcttggtttttctgttgttgaatgtgcttttaccttgtcctcttctcattctttcttctgatggatgtagcaggaatctcttcctctcctggtgggtatgggaccaaggttcccttctgttatatgcaaacagttgcaatactcccgatgtctgtcctcttcttgtggatggaggtgggactgttaccagggccttggaagtatctgggtgtgttggatcccgtcgccaagtttggctgcgtgagcagacccctggcatcacgtgtccccagcactgccatagaacgagcagacccctggcatcacattgtccccagccctgccacagaaccagatgtctcagatttctatttggtagctctatcttaagtttcacccataactattaatctatatattttataaacatcttattgaggacgccggcggaatgcttcccgtcttcctgggatcacatggtggctgcttcttcactacatttcccagaatcctgcttctgttagtcccatctatcttgctttcttattggccaacagtgctttattcatcaaccaataagataaacatataaccagaaggacctcccccatcagcacctccctacacttctacaaaaagtgccaccaactaaggacccagccatttaaatacatgagcctatggaggtcacctcatcccaagcacatcactagtttatctgtttgatctgtagtttatttttacttttaaaatgtttgctgaactgggctgagcttagggaatcctgttgaagagagggaggaaggattgtatgagccaggagggtcaaggtcatcacaagggaacccactgaaacttacatgggctcataggggctcatggagactggactgacaactggggagcctgtgtggaactgacctaagccctcttacatatgtgtgacagttgtgtagcttggtctacttgcgtgtctcctaacagtgggaacaggcctatccctaatgcttcggctgcttttgggaacctatcccttatacttggttgctttgtccagccttaatacaaggggaggagcttagttctacctcagcttgatatgccaagatttgttgacacccacggggaccctgcccctttctgaacagaaacagaggaggaatgggttggtgagatgtaaataaaaaatgtctgcttaatatttgaggtcttgttatcaataaacaagtttagaactgttgctatagttctggagaatcaaacccattcttagggtgaagtaagatctgataacattagtatgctctgggccacagagactgtttcatctttatttgtagtctttgtgcattttctccctttaaaaaaatcctcagtcttaatgttttagatgtgttctttctaaataacatgtgtggcttccattctgtgctttggtataaaactattatgtgggcttacgatcttagactcttaactggaacattcagggcatatgtatctaatgcaattagtcacgtgtttagaaggtcagccatcatgaaacagagaagctggtatttcctcctgagaccttataggttgtaaggtccattgaagtagagttgtcactgaagaaactaatctagaatgaggaggattaaatagtagtaggcatttctcttttttaatcttttaaatatacacaaaggacttatctgcatggacaatagatgtctattggtaaatataggcctgcgcttttggctatggctaagaatgcacccatggttaagtaactgcattaattctattactgaaaggagtttcagagaaactagctagattcattatgacaggatgttagaattacaacagaaaaaagagtattttgtgatttgattagagaatgagaaacagtatagatacagcaaatggaggcactagatctgcaagttaaaaaagaaggaacaaaaggctgaaaaacaataattcacccgtcacaatcatttatggaaaacatccatgcctaaaacacattccccaaaacaaccaccaatgaaagccactgaattgcatagtagaattatgttacgacctcatttttttctgccatcactttcatcagggaaaatttggatgacaaggtgattgtgtgttgattgcagaggtcctcccatttctgcatcactgactggcggaattctggtgttaagactccgctgtaggctacacatgcagacgaaagaagtatgtcaccgaagatgcctttcaacttgttgtctattacgttgactgtttgttgccatcgaatctaaatgttaaaatgaaaatcagtttattgagtagataattatttatgaaatatttaagtgtgtggcatacatgcgtggacatgttcatactgggtgtctttctctagtgttctccaccttatttgacttttttggtgtgtgtgtgtgtgtgctggcttgagagtgagcttatgccacgtgtgcatgtctgggtctgcagggaagggcagaagaggaccttaggtgtcctgctctatcactctctatcatactcccttgaggcagggtctctctctgaacctggttagattagcagccagaaaccataagctgtcctcccccaccccccgcccatggttgttgggatctgaacttggtttcttatgcttgcatagcagtgttcttacccactaagcagtctccctagcctatttctattatatatttctgtattggagacaaggtctctcactgaacctggaactcaccaactggggctgtgctagccggcccgcaagtccccaggccccgcctgtttcttccctccagcccttggggacagatgttctaaactcagttcctcacacctggaggcaagcactttgctcgtggagtcacctccctggcctggtatcatgagacactttgaagatgaatggtctccatgcttggtctggcactgctattaccacacccattctattctgaaggtacaagaggtgaatggcatttaaaagtgggccaggctgggcgctggggcacacgtctgcaaactcggcactcaaaagcctgattcaggagcagtgccatcaattccaggccagcaagggcaacagagacctgagatggatttcactcggggttttatcacatactgcctaaaactacctggcaatactatttcttattgagatctggagaaaaatctcattcagataacacaaaagaattctggtggctttgatagtaggaaacagactacaaaaatcttaccctgtccctgccacagaactgttttctgagaggaaaactagtcctgataatgaggtcaaggcctgctttgactgcatcatgagaattggcccttcaacaagcaaacagaatcccatcatgttgttagtaatgctcagccattcttacccccaccatctgctggacagtcactgtcaacagatactttattgtgaaattctgacacttcaccatcccattaaaaaaaaaaaaaagccactgaaccaggaatggtgatgctcatatttactctcagcagggagacagaggcaggtgcatctctgagttcaaggccaggctctttttccattgtgagcgctatctcaaaacaaatagataaaatttcaaaaaatgtcaccgacttcatgttcagaggagggagttgcagtgcagagagcaccaagtgtgtgcttggttggtcactggaggaagcatggttaacagaaattcactcctctaggatccaaagaccaggaatagtgctggtgtgtgtgtcctgtccccccctcctcacaccccccctgcccccgccccactcagcagtcactggtctcttggggacatcagtcaagttttgaggagagtagtctccgtctgggtggtgtgaatttttaccacaaccatatcattgtccttaaagaaccttccatgatatagtcatcccaaaggacaggtgaggtgtaactaaaccaagattctagccagcttattaggagtgaattagaaacacttaaacatcagataaaagggatcagaaggccagcagaactaattgaagttttcactttccattctaacgacagccattctctttggtgtccatacactcaacgtgcattgttccaggctggggaagaaaaactcacagcaaggccatcgaaagccctgcccccacccccacctcatcagacagaaatgtatggctatcttagcagcaggagagaagagccctggctaccaagctgacagggctccttgctggagtaagacttcatctagatcttcatggggtggtcagatactgaggcaggctaggaggcgaggcagagtcaagtgcaatctgaccccatgggaactggtaaaggagataaaaagccaagggaagccctgccttctcatcttccaggacagttagcaggacagacgcacactgcaggcgcttggtggccagctttttccgattggctagttgttgtttttcagcaacgatgtctttgtaggagttgtgtaaaaactgtaaatgttcctcaatctgaaagacaattcaattcgtcactgagaaaatgtctcactcctacttggtttacagcttgtcatttctcttgccttagcatgtaaccacttcccattcatgtcttaggaaatcttcccacatgggtcacgtgaacaatgaaatgctcacatggaagctagtggcttctcttagccctgaagcaccatgacatgccgtctgctttctgcaaaagctcttcttgcaatcctaagcattggaagagtcattttctaacttactatttgttcacaaagaaaactctatgccatgtctaaatacattccctaaggaaacggctgagggctggggatgtagctcagctggtggcatgcctgccatgctgcaagaacatctaggatttatcttcagtgctgtgtacaaccaggtgtgttggcacacatgcctacactcaggagtagaggacggagggttgcaaattcagggtcatccttggatactaatacaaaaaatgtatttagcatatatatatacattatctatctatctatctatctatctatctatctaaatggtgggctggaaataatgttctgcagtaggatttttaattgtgtgtgtgtgtgtgtgtgtgtgtgtgtgtgtatgtgtgtgtgtgagtatgtgtgtgtatgtgtgtgtgtgtgtgtgtgtctgtgtgtgtgtgtgtgtgtgtgtgtgtatgtgtgtgtgtgtgttgtgtgtgtgtgtgtgtgtgtgtgtgtgtgtgtgtgtgtgtgtgtgtgtgtatgtgtgtgtgtgtatgtgtgtgtgtgtgtgtgtatgtgtatgtgtgtgtgtgtggtgtgtgtgtgtgatgtgtgtgtgtgtgtgtctgtgtctgtgtgtgtgtgtctgtgtgtgtgtgagtgtgtgtgtctgtgtgtgtgtgtctgtgtgtgtgtgtatgtgtgtatgtgtgtgtgtgtgtgtgtatgtgtgtgtgtgtatgtgtgtgtggtgtgtgtgtgtatgtgtatgtgtgtgtgtgtgtgtgtgtgtgtgtgtgtctgtgtgtgtgtgtgtgtgtgtatgtgtgtgtgtggtgtgtgtgtgtgtgtgtgtgtgtgtgtgtgtctgtgtgtgtgtgtgtgtgagtgtgtgtgtgtgtgtgtgtgtgtgtgtgtgtgtgtgtgtgtgtatgtgtgtgtgtgtgtgtatgtgtgtgtgtgtgtatgtgtgtgtgtatgtgtgtgtgtgtatgtgtgtgagtgtgtgtgtgtgtgtgtgtgtgtgtgtgtgtgcacacacaagagtgcatgtccatccacacacatccatcacatccatccaggtgtccctggaggccagaagagggcatcgatcgcctggagccgagtaacatgggagctgggaacaaaatgcaggttcgctgtaagaacaatgacaagtcctctcttcagcctcttgttaatacttttagatattgtctttgctttttcatttctcctgtcttccctcacgactcattacctagttattaaagtgcagggcatattcatgaagcttaacatacaatcatgtggtgagcactgtgcttcctaaaggatgttttgatgaggtcatgggtgattagtaagttctaggcctatttcccagagttctctacaattttcagaagtattttctacaatgaggcccagatgggcaaaaggtacgtctctgaaatgggacaaagtatgtaacaggaggacattcccatacagggcacagagccagtggcggtgactgtagctgggcggcagcacaggattgtacttgagaaacacgttgagcaggttcactgaactatggcgcagtgtgctgtgagtctgtttccgggagaagctccgactctggaagggtggctgagcggatggacatagtgtatatgcacatgtatgtatatatacacatgtatggatgaatgtgtggacttcaagctgccgaaatgcagacctttcagctttgagggtgtgcgcatgtcctcggtgcaatctctctgcccagactgcagcacaacactcaacaacctagtttgccctgtgaatcctagattgccctctactcagaatgtggccaatgtcaggttgatgattggcattctagctccagttccagacattagacagccgctaagtgtgacttcatgaattaatggttactataaacaggtgaaatgaggactccatgctactggataaaccttttctttctttccctcccccttccttttccctgccttccccccctctctttctttcctttttttttttgtggtttttcaagacagtgtttttctgtgtaacagtcctggctgtcctggctaggttagggttagggttagagtttgaggccagctctggagaccaggctggcctcaaactcagagatccacctgcctctgcctcccgagtgctgggattaaaggcaccactgcctggctgacccattttatagattgaagtcataaagatctcttggagaaatgtgatgaaatagtattgtgtgatgataattaacaatattgttgattgttatgtagtatggatagagaggcttacgtatcatacttatattatctacttagacctcacaattacactcttaaatattcttttttttgtaaataagctctactgagataatggcttttgcacaccccagccttgcagtgctagggatggaatgtcaggcccatatgctactggacagtgctctgtcatgagcaattccctcatccttgaggtatttattgactgctccttggcaatgttatgtagctcttacaggcattgagaatttgataagtaacaaaagaatttgataagtaacaaaaagaatttgataagtaataagaacctagaactcccaaaccttaccagttgtaaacctttttgcttttccagcagcctttgctttgccattcgtaggacattctgagcttcagccacttgttcctgcttgggacccaccaccttcaagggaggaaaacacccaagggtttaaacagttaggcttatggtttaaaatgccttatgcctgagagacatttacaagtatcaatctttaaaacaaactctcctggaatttgatatatgcacacaagagagagtttgtcatggacaaaatcttaaaacaaattgaaatgtagcatggctttcatagaatatttaaaagaaaccattatgaattagcataacatatgagagtgtatggatttcagtaggcattctttccacagaggtccactcgagcactgctaaataccaattccttttggaaccatgtcagacttcggaggcgaggtgtaccttctgtacttcgtggtagttattcagagctataacccactgacacatggagcaacaagccacagagaccagggcaatcttgttggggttgaaatcaggcaaacttaaaatcttcctgagcttcaagaacacctagggagaatgtgttaaatgcaaggtacattagaatggatcattaatttctctaggaatgatattccaccactgcaattaaagacactgcagttgtgtctagggttgaaagtggcccctagatggaggggacccttctgataaacacctgtcactgttgtagtgagtttgctaatatttaaaaggaacttcagccaggtggtgatggtgcatacctttaatcgaagcactcgggaggcagagatagtcaaatctctgtgagtttgaggccagcctgatctacaaagtgagttccaggacagcctccaaagctacagagaaaccctgtctcgaaaaacaaaacagccaaaccaaaccaaatcaaaataaaaaaagcttcaacctgggaaaatttagtgttcttcgaggaggtctcaatcccttggtgcactttactgtgaggggtgacatcctgcctccaggtgacctattggcctaagggtgccatctaatttatagtcaagtacacagaatttcctatctgcctttatgagccgtaaatggtacagagtcttaggcatctcctctcttgcccagaaacaccactttcctgaataattcagatgcttgtggctcactaacctgccactactaatacgttctgattattttgaatgcggttaggcttttgatcacttttttataatagtgagtctttttagatgtatttaaacaaaatcacaggggaccatatttgctaattattcctcagagaatgaattgttacattagttcaagaatgagagtcaccactgacattcgcttccttgtgtggacctcagaatgaattgttacattagttcatgaatgagagtcaccactgacatttgcttccttgtgtggacctcagaatgaattgttacattagttcatgaatgagagtcaccactgacatttgcttccttgtgtggacctcagaatgaattgttacattagttcatgaatgagagtcaccactgacatttgcttccttgtgtggtcctctgtgcttcccagtggcacagactattataagttctgctcaagatgtatgcttaatatgaggattataggagaacactttcatgaggaaactatgctctcctgttctcgttttagcatttatcgtgtgtgtgttctcgtgtgtgtgtgtgtgtgtgtgtgtgtgtgtgtgtgtgtgtgtgtgtacacgtgttcgagcacacacaggtactgggacacacatgaggtcgtttgtgggtgacttgttcaagtcagttctctcctgtcacagggattctggggtcacactcatgcttgtcaggattggtgatgaacccctttatcatcttgttggctcctcctttctcttttagtacttaccaccgtgttccatctgtaatacatttcatacttaaatccaatttaaattttcacctataatttgagaaccaattttagcacttctgctcgagtctgtggactgcaaatatggaacccatctatctatcacatactcaccagatatgggtgttttaccttatcagggatgctgtccttgtcaaggtttatcagtttctttaggaagccagtctcagagagcagcagcttggccgttgcccagttaggcttcctctgtaggaggatacacacggcgttcatgactgtcaggacgaggaagggggggcgtgcgtacactctgtaagacagggtgagcatgctgaaagtcagtctccctgtaagcaatcccacatcacatacacagccttttagacatcacctacataaatggttaaggtagtctgcagaataatgggtttcgttatggaaacctcaagttaaaaatatcccacccaaagattaaaatcaggatcaaaaggttcaagcctttgtactccatcatatttcatttcttctaggcctttctgggatttttctcttcattctttttcttcacacaccagtacatggtttggaaaagacacactagggctcccatggcgcccccttgaggaatgtgtcagcactgcagtctccttgttcttggcaggttcctcaagtcaccctggaatgagtgctggagcatcaacactgttctaactgcagttcagacaatgctttgctttacctggtctaggacgtaaagttttacatatcagagatggcaatttatcttataacaaatggctctcagtcttagctgggtggtaattttccgctcttaagggtccataaaatactgtcatgccttaaaaccaataacatatgataaatatcacatgtaatgagaaacttccagtaaccaaatggacacaaattagttaatataaaattggaatgcagaatttaccacacatttttttttttttagttctattcagaggtgttttatctcaaaagagacaattactcaccttaattcagaaacatcacttttatccagggcatttagggccactcttgccttctctaaagcaggcagcacgctttttagctcactggtagttttctgcaatgaagacgcaatcctcactatatatgaaccaaagtagtttcatattgaaagttgtcggaatgttgatgagaaatgtggtttggcatttttatagtctgacttagacatgtgtacactaatggcatgttctgccatgggcaacattttataaatgaaatgtgatgtgctatccaacccccggtgagaaggaacccataggaagcagaaaagctgggtggctttggccttgtctttcagactcaacatggtgtgggcatgccctttgaggagtggctctgctacgaggggggcttggtgatgatgaccaagaactgggcgtggtggccacacctacagccctagcactgggaaggctgagtctgtgagtttgaggcagcctggtctacagagcaagtttcaggctagctagggttacataatgagaccatctcacaaaacagaaacaacaaaaacagtgaagagctaatcagttaagccagctgagccaggttgtgggggtgtatgcctttgattccagcactgaagaggcagaggcaggtggatctctgtgagttcaaggcccacttgttctatataccaagttctatgccagttaggacacagtctcactatgtaagcccaaggaaacattttgaagttatgtggagaacaacttgagatctacgttgacaagcactgtggttcacaataagccttgtcctcggactgacttgtgcttcgggagattagccagcgactgcagctcatggtgtaactggtaaatcaatttattccaatgtatgtggttgctttgttgagaaggattggcttagtgatcagactagaattgagcaaacaatctgcagaaccatgctggctcctgctggaattgtgacagagagatggaagggaatacagggtttcccaagggaaagacagaagggcacagttgaacagtcatcctcaagagctggttggctccctgcagatgctgcacctggaggcgtggcccacgtgacatggctcatgtgagcttcagtgaagcctgcagagctccctgggacaggcacccttggccttcgccactgtgcgcccatcttcccctaacggcctccggtatggagtgggggctcagtacgtattgcctcaggaaaaacaaagctgtccatctttggaccactgccttcacagtgggggttcagggcagtgtgtgtggggggttccctgaccctcagctcacctgagcatattcttccacaatcctaacttcctcggccacaatttcctcgtcctgtttcacaagcacctgcactttttcaactatttgcgaatctttccgcagcttttccatcagggcttctttttcctgacgaatcagacaattcttagaatgaactttgacacggtttcttcggagcaggcattaaaatattttagtaactgtataacacagaaattagcctgaagtctatgtaaaagagtaatcaggatggctaccataaagacgattttacacacatcaagatgacaaggggctagagacgtggctcaggggttaagagcactggtttctcatccggaggacccaggttcaatccccagcacccacatggcggctcacaactgtctgtaactccagctccctcttctgacttccacaggcactgcgttacacgtgtaatacatgcatatatgcacaatacatacatatatacatgcatgcatatatacatgcatgcatacatacaggcaattcacccagataaacataactttataaaaagggtctcacaagagcataactggagtcccagaaagagaatatatatgaagatagcaagagtgggggcgggtatgccacagcagtagagagcttgcatagtgtcaggtcttagatttaatctctagcaacactcacacccccgtcacatacacaccccaaaacaaaaaacacacgcaatagctttttaaactaattaacagcctgcaaatgatcatagcagatttctgatagagttaactgattacctagggactcctgtaaggtaattttctgtcgttagttatggggctggtaagtttgtatgtcagtttgataggcactgggttatccggaagaacaaagtttaatggagaaaacgcttccatatgactggcctggaagcaggtctctgggggcattttagtggttgatgattgatgggggaggacacccattgtggtccttggttgtgtaagggctgagcaagtgaggaggagcaggccaggaagcagccctcctccatggcctctgcctctgctcctgcctttaggttcctgccctgcctgagttccagtgcttacttccctcactgacagattgtaatgtggaaggaaacattggctgaataaaccctttcttcctcaagctgcttttagtcacagtatttttatcccagccatattaaacttaattaagacataggatcatattaattgttaaaatataatttcttcaaagttgcaaagggacgtcatggctaacttatttgttaggtagcagacgctcggctttcaaacactcttctggacccaactacagaacctttagggagagatttaagactaaaagtacctttgttttttgttctatctgagggccaataatcaaaagttcttcctgcatgtctgtgactaatacggttgcttccagaatcttggatagccccatgtggaagcgattcctggagagaaagtaaagcacaggctgaccctcccttatcggagacgcttaggaccctcgagcgctctggatgtggggatgcgctgaattttagactgctcaggctgagcaacctccatctgaagtctcaacagcctcaagcttttccagctccttctgttaacatcccaagtgttagatgccattattaggggtgctcacctgtataaagaaggaaaagacacacaactgagtagtagcaactaaaatcaaaagcctctaaagaactacacatcatgatcaagctgggtttatatttaagggattaaagactgattcaggacttgaaagtcaactggcatataacccacctgtattaatattctaaagcaggaaaaatcagaccaggtcaactgaaaatgtatcaaaacacgataaaattcacaacaaaaataaaactgggagtcaagaggacttttctcaacttgttaacgggcgtgttacagaaagaagaaaacagactcactttgggcatacagtgttggtgacagggtctaatcacaccagttacatggccacgagtggatggcagcagtctcccacagaccctagacacaggagtggaaggtccactattctctcttgattctcatctggagagaagcttgtcactttacctaggctgtcctcacctcgatttaactgcctaaccacagaaatcttagtctgacagaaacttccagaaggtgggtgcctccactggagcaggagagtaagattcacttctgaacactgtgtggcttttgtagcctgggttctgactgtccaaactgctctgcatttaaccgatacagtcttttatacccacctagtgctgttaacaaaagctcaaagaaaatttaatcctgaacccacattagcccaactcgatagaggctgccctttccttttccgtaaacaccaggctcggatgcactcgtcgaacacagactaagctcttcctgtgagcagtgatgctcctgctgaccagctggggcagagtatgtataactgccagtacctcttgcaacaccagggtgagccatgtggctcggctccaggcagggagtctgactgtggtttagcttctaagtgggagtcatcaccagagctactctctttcaatgttccacaagatgacctgaatggattctgtccaaagggacctgatggtggcttttccttttaaagacttgttagctggacacacagcaggcctgcggcagactcgtattagagtgtttgttccatggcgcctgaaggtcatctaggcaaggcttgactgcaatggttctgactctcagcaaactcctgtgatttcccccaccatgtgagaattcggaatatctgtgagtagatgttacaaggctgattccagtccatttactgtcttcctgggaggttgccataagaccgagtctcggtgtcttcctgggttctggttatgtatgagggctgtgggtgtaagctagtggcagtgttggcagggcacacccgagtccctgggttccacccctagcactgtgtaaaagttaaaaagagggtgagaagtatgtgagagctggaggatgggaggtgggttgagaaagctgtcttctggacatgccacggccaggtactgcccctatgctcattgcataagctcacgtcaacaacatcagtccatgtcccagcaagcagcactaatcggactcatgggttatttaaagacagtaaaaaaggaaaagggcatgaaagcacagtagggggacacgctgagggaggctggagggaaaaggtggggatgggcatgatcaagatacattgtatgtacgtacgtacgtacgtacgtatgtatgtatgtacgtatgtacgtatgtacgtacgtatgtacgtatgtatgtatgtatgtatgtacgtatcaaattgccaaagaacatgtaaaagacagtcctccaataacaacaagagatctaattaagtctgaggcttcctgccttgtgctttcccctttattctcagccacggcagccacctatacagtgatttatggccgtgtgacacggtgttctcagccacctctgctgcagtcactgggccatttctgtgaagtgtgacaagtgttctcagctatctgtgctgcagccactgggccatttcttttggtcttatccccaaagtcacagggaatggcacttgcagccatcaatggtgtaagtgggcactgtctgcacttgttcccgatgtctgtgtaggcgatatgccgaatctagcaagaactgacttctcattggcacacctgtaggttctgctgtgatgggcggcctctggacacatgcaaaggaggcgggacagtctccttatgatccaccatagtgttggccccaaggcctccatgagaaaggaatattcaaattcactattttgtatttgtgtctattttttttgtaaataaaattgcgtatgtaaaaacacacatttctattttactggaagccttacctttttatcgtcatctcctcttgtctcatgctcagaatgtgtgtgaacgtctccagaaacttcaagtagctattgggggtgacgtaatagtgccttccagtgtcttcaaagtacttggtgctcaactctttcatacttttgtggatttcgacacatgttgaggcaaactgttttattttatcctgaagaatgacaattttaaaaaattacaagagaatataaaaagagaagaatgggcagtaacttgaagccctgtagtgtttctgagatgcagagtgacacaggcgggccctgggtagcaccagggtcatgtgggtttcaaagatgggagaatgaggaggtagtgggacaacaatgagtgactaagggcacaccagatttactcttgcagcttgggctctaatttctgcatcaatagtcaaggcttgtcttagttagggtcactattgtgatgaactaccatgactgagcaagtcagggagggaagcgtttagttgacttacacttccacatcatagactaccactgacggaagtcaggacaggaaggagctcaagcaggataggaacctgaaggcagaggccatggaggggagctgcttactggctggcttcccctggcttgttcaacctgctttcctatagaacccaggaccaccagcccggggagagcctcacccacaatggactgggacctcccccaccaatcactaattaataaaatgccctacagcctgattttatggagacattttcttaattgaggtgctctcacccccttttcagatgactctagcttgtatcaggttgacataagaccagccagcacagggctcttggaatgttagcaatagcaggacactctgggaaatactccaacggctgcagaagcctcacggaaggatggtaacagaggtatccctaggcagtgtagaccctaggtagccttaaaacaggcgggtagcaggcacaacagatgtggagctcataaagaatcaggatatataactgagcatcacacagcttagcttacagatgcctactcagagatgtgatcacatgctgacccaaagccacgcccttcatgggctttaggcacttacctccttgttttctactttcaccctttctcccaggtaggaattggccacaataaggagagcttcatcgggccacttgtggaaccagttgatggtgcaggaggtaatcatcgaagggtacattctacatttatggcggagattagatcctacaggactcatgatcagaaaaacatgcagattcttagataccctctgaaattgacagaatcacacacattgttaaaatgtaatcccctactttggaaatgatactatatcaaaaactcagttgaaaacttgtttcagctatttcctaaatggatagacttttatagactagctgagtgtgtgtgtgtgtgtgtgtgtgtgtgtgtgtgtgtgtgtgtgtgtcttcacatgcatgtgccatcaacagggctcttgcaggcaaaccagaagcccacagagcccttctgccccatataactggccttgttgacttcagatggtggatccagtactaactcttacaaagcgggaggagacgggtggtgcttagacaacgatgatgagtctaccgctaactcttccctggggtgtgtgcttttagcgtgcacagaaatgcaaagtaagacagaggtcagattagaggtcagacctgaaagagagcatggagagaccacagtaggaacaaggtcttaagagttagtgggttatggcaaggcaatattagaaaatgcataggtcttagactaattgccagtttcttttttttatgattaagataaatattaatttcattcaaaacttcattcagcaacacaccactttgcatattgagcaagttcctttgtgccatgtgtaatcaaatgtcctagaatgagaatatgaatacaagaccacttctgaagtttgcctgtacccgctttgctcctaagacccaactcaactgctgttgttgggtatttgtcaagactggccacaggacccaaggtcctttccttccatttccatgtgccactttacaacaagtccacagaactggaggggcccaccagacggcacgtttctattaactcagaatccaaattactgccatctctaggtaacttattttctaaataagcacagcaaggctgaaaagcagaaagactgtaggggcatccaagcaacctctcatcatgtttgttctctatcaaccgtgattccatctctgggatttcaaagaactgatgttcttgtagcacaaaaaaagcatctgtcatggaaatgtgggcatccaggtttaattttcaaattcccttacccaaaagcatgcaccgctcccccccccccagtaaggcccttccccagcacacatttttgtctgggttgagtaattatagctatagttcattacactcttggctacccaatgccagatagccatggatacaagacaataatgatctaatcctcgttgtgatataacgaagaatctcattcctcagtttctaatgttaggcatttttcctgatcagtagtagagttcaaatcttccagggatgattcattaggcaagtcacatgtttaatcatcaggacatcaaggcagacagacaaaagcccggagcactgttagatctgtgtctgccatccaactggagcttctgagacccccactgctgctttcttccttgccctttgtagacaatttctctctctctctctctctctctctctctctctctctctctctctctctcttacatatattttctttcctgctcaatcctagtggtgttcaaaggggtgaaaagaatccttgcttttcctgacttgataccaacgtaactgaaatggaacccttattgaactcagggaaggatctcaatgtaaaaaaataagctggagaggaggttttcatctccttacaagcagttgttttttctttcgttttattttagaaaacgattagtcatttagcctcagatttgtcaatctttgggacacccagggcatgctgtgtctctgtgtaggagcactggatattattttagctttttaaaactcatttgatgaactaaagagattatatacaagttgaaaatcacttacagaattataagcatgctttactttaaatttaccaggacaatttgataaagtcgagtttcaaaacagtaccttttggaataatgtaagtaagtatttcttgtcatccattaaatcagaatgctccacaaaatttctaatcctcataacaatggaatccagctcctcattttcaaacatgctagcagcctttcctccattgacaatgtagttcaagtcttccataaatgactccttaagtgaaacacagactaatgagatggatgaatcatacgttcttctttaaacaaactgagaaagcatgggcactccagggtaactgaaggtacttaccaagacagctgacatcttagttcagtctcatcaagataagcctcatcaacccacccatcaattccaacatgtcggggagacatatgcttggtacccagtggatatcatgtgccatgggttaaggtacatagcagtgagctgggcagggacttgtgtcaagcagttcatagaaacctcaacacagccacatctgtgtttcaccagaagaaaagctagaaatagcatggcggaggtattattttaatttaaacaagcctcgtctcaccatgttcatctccgctcttggccagagatggctttctataaaaccattgatgaaatagaatggtgggctccaagcatggcaggaacagcatctctccaaactagaaagaaaggctgtttgataagcttcacgcggatcagtggatcagggtgtttagatttggggaaatgatgaatacacagcaaaaagcagaaaatttagattcttataaaatatgacagatatgacacaaaacttcatttattctcaaatatggcagtcagtcgaaaaattttggtagccagagaagagacccagaatcaggagaaaaagcaggatggggtttttaaagtatatttttatcaaaacacaagtcatgtacaacatttccttgaattttgtcataaggagtaaataggacctttggtgacattcgtaattaagctttgacagtgaaaggacacaatttgtacaaaatagtgggggaagttttgcttgtttgtcagaaacaaatctgcaaggaaaaccccaatagtgataaaggagagaaagggaaatgctccaagttgctacagcacactaagttacaaacacatctgggggcagagaacggaactagttttgatacaaagtggatgattttgctacagggaggaatcacttccaatctgttgattaaaacggaaacaacaaagacaggaaatacttctgctgggtgtttacctagagctatggcatgattacaaacacagcccatgggctataactggatgattacagagggttgaaacggctccataatagaaaactcacacacataagtgtgaaccttcctgggggcatcaacaccaacctttagcaagtcaaaaagacatcaagcacttacttgttcttcttgtaagttggcaaccatgacaacagtggggatcccttccaagccagtttgaataaacacatttttaaacatgtctttgaaatctgagatcacataattgtgggctgcaggcacgcggtgtactttgtgttctgctatgtaacaggctaagcttgcatacgtttcttttccacatccatctattccaatctttggaaaacaaaccaaaaagccgaacatcggattcataacgtcttggagttagggatgtatcacaggtgagtactactcgtttaacaaggaccagaccctgaattccgttccttagcacacacaaatgattaaatacccacaaaaacaaagggagtgattcctatgtactttctgggaactgatcaataagtacttttctctttatttatgctagaaatattcacagtaagctatttcagactataagacaattgcttacattttaacatcttcatagcctcttaaaatacgtgaaattttactgatacctggagaaatagcacaaattgacttgtaaaccaatagtgcaccattatcaatacccaatgcttcattcatatgaaagtagatagggggttcttttaggcaatcatgaatgttcttttggtgatgatgaaattacctcacatgtatttgtgaatcctgagctgaggatgcagctgtgttgcatcccttgcctgcactggaccaaaccctgggctgatccccacaccacataaaatagggcgaggtggtacgctcctgtaatcccaccacttgggaggtagagaaaggagggtggcctgggacatgtcaggccctgtcttaaaaataacaaaattacaaacactaaggttcagtctagctgtgaagctccatggttttgacaaatacatagcttggtggtttgaaagaaaatggtccccagagtgagtggcactattaggcggtctgatcttgttggaggaagtgtgtcactgtgggggcgggctttgaggtctcttttctcaaatttccctccgtgtgacagtcagtcaacttcctgttgcccctgagtcaagatgtagcgctttcaggtccagcagcacctctgcctgcatgccaccacgctccctgttctctgccatgatgataatggactggacctctgaaactgtaggctgccacgccaattaaatgctttctttataagagttgccatggtcatggtgtctcctcacagcaagagaagcccaaactaagtcatagtgtaatgcattcatgatttcattatcaaacagaatttcaccacattaagaagactgttggagcttccctcttgagcaaactcttggcaaccactgatactcctatataattggaatcatgtaagcataccactttccagattacctgatttctcttagtaatatacctttatgatttaccatgtcctttttcagcttactagcttgtgtgttggggtagtttcctaaggcagaaatcgaggctattgacttttaagttttctttttaagtataagcacttagatctaatagatttcctatagattttcctgtaagtattgctttaggcatgtagtgtaattgcttttcattttcccaagctattttctaatttgacaggatctatagtcaccttggagacaaatgtctgtgagggagttttaggctaattgaatcgagaaggctgaccctagtaggcaacaccatcccccaggctggagtcctagacagaggaaatgggaagaaaacagctggtggtggtgggaggggagatttattttgtattgtgcttcttgattctactttctcattctaaaaatgccttttagttaattttgttcaaatgcctacttaagaaaagattctctaagtcaaaatctagtgttacatgcaagataaagtcttctcttttggagaaaaaaatataaatggtagccataaaaacaaattaaataatatttctatacaactggctaaatatcatggattaaaattgttctatcacattatttattatgtgtgtgaatgtgtatgcacatacatgacacagcctgagtatagaggtcaggagagcgcttgcagtaggtcctctctctaccatgtgggtctcgggatccaacccacgcttagcagcaagcaagcactttcacccactgagctatcttgctggtccaatattgcggattttattttgctttctaaaaccttttctctgttacaagtacttggcactttgttaattgagctgccacttattctcataaggaacacatctttgtgcaatggctcctatttctaaatcaatatccaacttagtgtactatttttgaagccaggctccacctgcgtagattctagattaatgctaggatacattacatgtggtgccaagcacatctgtttagccatacccaaggcctttcccaaataaataacatgtccctgtgccagtgaatttcttctgtaaacaatgggatcctgttctatgactcagttaccgggatttttcataatttatttgaatacagcttctatatttagattttactggagattctgaatttttattttgcaaacttaaaaaaaatttgaaaaactgaaagtcataccagtaacatgtgactccctggctgtcggaggattctggtagctcttgtaatgtgttctatagcttctttgaagaatacaattgaatgagacatctagcagaagaaatgtagcaaataaacgaattacaggtttagaaaagtgtatcaaatatgtatgatagtgttacatacaaggaaacaggagtgtgagtgactctgtttagtagcatggtggtggtgacccagacccagttaacagtctatgtcaacatttagagaagacaaatgttcacaatcggctcactcactcctttgcgaacagtctagtgagctgacctggaaagacatggggatgaggggacaggatgaagagcagaaaattggtatctaggttgcttttctattgctctgtattggcagtggctgtcgggagagacttaggaaattatgcatggggtctgtggtttgcttggcgtttctgcttcagcatgtctctgctcatgacagcaacggaaaagatgaaaagagccacagccatggcgcgtgtttgtcactctggaccctggttgctatattctcttgcatttgactccatctctctgctattcaattccccagtgcctcagctacaccccatcttcacaattagatgtcaccgggacaaagtctagagagagccacaaacaactgggtttctgatggtctgctctgaaatgggagggcacattcctccccccccaactcaggcacacgcaccttaacatattatatatatatatatatatatatatatatatatatatacatacatacatgtacacacaagtaaacacacccatgtgaagcactcttcaggttttcaaatgctgtatctttacctccagagctgttgaacccagcttctgttggaattcctgaagtatgccaagaagtttgtcgaagttactgacgctccggtagatcttttttctgtgaggtttgtttacatccatgaagtccacaaatacagtcgggttattcatcaggctttcatgtgcccagtaaatctattgcagataagaattcagtgagcactcaactgatactcagatttcattgtctttacattcaaatcctgtcttttacccagatcaatctgtctgtcatagaagcttctggcagtgaataccaggactcagtttcttaacctgtttttttttttttttttttgtgtgtgtatgtgtgcatatgtacgtatgtgtacatgtgtgttctttcgggaagtgaagcttgtggacccctcttcgaaataatctttttttttttaaatgcttgtaataaaatacaagtgttacaagtaaagtcaagaatcttgagatacagttctgtccacaaactctcctttgggcagagagtactgtggctgggggtagatagcccatagcttcactgacaatgtgggaaaagggttcttcctcagccagcagtcagtaaccaccctggtcctgtggccttgtacggttggctttatacagttgctttcttgtctagtttgcacgtttttggttctctttcataccaaggctgctaactctcccccatttgccaattgtctcatagttttcctcctctctaaaaccagccacagtgaatggctctttcccttcttgttcaaaggctgggtgtttgtgctggtttatcagagcttctggcaaggtaccctgtagctcctggctgacggtggctgcaggccatgtctacacaagttacaggaatccttagtgtgtatctcgcttgctatatagcactggaaattcatggtggatgttcaggagtaattgacttggccaatagtggtctggggacgggatggcatgatggttgagagactgtatgacatcagacatcctggggttgggtgatgatgccatcacttgacccctgtgcaagcttgtgcaaccttcctctgctcagcactgtcatctggctagccctgccccttcattcactctttagtcatttgtcctagatatatgtgttgaatgctttttacaaagctgaattccacagatttatataaatcaccaagtctgtccttacgaggtgtgtagactggaaagagctaagtcaggtgtgtgagaggcaagtcctgcagtctcatacaaagaagagttaccatctagaaggaggctgctattggccagaaaaggctaccctaaggtcaaaagtacactctgaatttaaaaaatgatctgtactgtaaactgacaaattatggtttcatatatgtacagggtacaaagtcattacactgtgaaataaaactaaataaaacacagttaccacccacacatgcattgctatgcccggcagttctaaaggactgatccatcttttctaactgaggcatcatcttccatgccttccatgaccactgccccattcctgagtggcggacctcctttagactttgctcacagtggggcacggtctttctgaccagagtcctggacagtgtccaggagtgagccatggggaggggtctgcagctttaggggcaacctaaactctggctggaataccggggcacatgttcagacttctggcatacacagaggcctggagacaaagaccaacaccagtgcagggcatcttgatggcggagagggtgccatgaatgcagacgaggagtggtttccaacatgctgaatgtgagatgcccagggtagcaggacacaggtttagagtcattctctctctctctctctctctctctctctctctctctctctctctctctcggttcaggttatttccaccaaatttctttcctgtgtataaagtgtagggggctggagagatggctcagcactaagagcactggcagcagaaactggaagcagcctagatgcccctcaacctaagaatggatagagaaaatgtggtacatttacacaatggagtactactcagcgggaaaaaacaatggaattttgaaatttgcaggaaaatggatggaactagaagaaaccattctgagcaaggtaacctgaacggattaaagtctctttattcaagaaaacaccagggcaaaacacaggccagagcgaggttacaggaacccagcaagcgtggccagaacaaaaagggctcgggtctccacgagccgtctttaagaagcctcccttacgtcaccttggctttcctacaccacgcccttatgggcgagtcctgggtccacctggtacctgtcccagggtggggctagggtgtctccctatagtaacccaatcacaaaaagacaaacatggtatgtactcactcatatgtggattttagacatagagtaaaggattaccagcctacaatccacactgccagagaagctagtaaacaaggaggaccctaagagagacatacatggtcccctggagaaggggaaagggtcaagatctgctgagcaaatggggaaaatgggaagaggggggagggagctaggagaatgagaaggggagaagaggagggatgcagaggacatgaggaagcagaaaggttgagtcaggggaagaatagaagataacaagaatggagataccataacagagggagacattttaggtttgcagagaaatcaggcactagggaaatgtctggagatctacaaagatgacaccagctaactatctaagcaacagaggagggctaccttaactgccctcccctgataatgagattgatgactgatttatatgccatcctatagccttcatccagcagctggtggaagaagaagccgacacccacaactaatcactgaactgaactggaatccagttgcagagaaggaagagtgaagagcaaagggtccagaccaggctggtgaaacccacagaaacagctgacccgaacaatggggagctcttgctccccagactgatagctgtgataccagcatgggactgatccagaccccaggaacatggatttcattgaggaaacctcggaaatctacaggacctcctgtagtagttcagtacttatccctagcataggtgtggactttgggagcccattcctcatagaggaatactccctgagcctagacacacggccctatcccaaaggatatgatagactctgatgacaccctatggaaggcctcaccatccagggggagcagaaaggatatgtgataggtagggttttagttgggggggggtctgcaggggaggaggggagggagaaggaactgggattgtcatgtaaaacaatcgtgtttctaattctgaaaaaaaaaaaaaaagagcactggcagctctactgaggtcttgggttcaattcccagcacccatatgggaactcacaactgtctgtaatcgtaattttgtaggatctgatgccttcttctggtgtgcagaaaacatgcaaacaagacatccatgtacatttaataaacaaatctttaaaatgtagacatggtatcatagtatcatagtatcatagtagctttgatggatcactgtgtatcagaaacaattttaaatgtttcattttcattagagttgctcattctcaccacagacccatgaggtagaaaatcactgcccttacttagacatcggaaaaccaaggcacagagggaccatcggctcaaggccatttgctcatgaggggaggacctgggctttgaacctcggcaaaagctgagtttaaaatctccagatcccactgcctctcaggatgctgaaatacaggtaagactagaagggctggggacccagtcctcacgggaaggactggggaagagatggcaccgaggcacgacccagtagcagctccagggaggcagagaacacctgtatcgtgggaagaactgtggggacctagacggttgacaagagggggcaggctggtgggtggatcaaagtgatagagtcagcataaacgataatattaagatgagtctagattaaaatctcaatgattttgtaattagctcagaagcatagtgtgcatatttaaatattcatatacagacacatatttacatatatgtgcacatgtgttcatgtgcacattgatataagtagagctctgcggatccagtttgcattctgcaattctgcttcactattgctcagctacgcccttaacatcctcttcgggtgtttgagggggatgcagggacgagggccaactcactggcccaccgagtctcaagactcacttcaagtcagtggttaccaattctctgtgacctacattaaaagaggcagcaaggaggctaaaggtcaaggggtggagagagatgaggagtctgggcaactcctccggctgagcacttctgctggctgtggagagggaggtagttagtgttggtgttctgaggggccagaatcacaaacaaaggaatcaaggcttcatcactccgcttgtatcttaaatttcgttctcagacatcttcaaggaaggacagaattctcaagaggacaaaagttgctttcattaatattacagacatatttgaagacgttcctaaaacaacatttgtgtgtgtgcatgctcagaattccacttgaaagatgcttaagaacacacctgcagatggcactggagttcctttgagagaagctggtagaaaaggctcttctcactgggttcaatgaaccgatcatgaaatactcggctggcttcatgaactaagagctgagccgccatatccttagagtggacgacactcttgtccgcctgcatcaaccccagcagcagctgtgagagataaaaaattaacatgataaacattaggaggggattgtgagaagcaaaactcaagttgtgtgggtgtatgttttctaaaaatagaagagactggccagttccacctccatccaccggccctggtaggccgggctgtttctggttctggttccggttcggtggccctgtcagagacctctgatgccaggggtctgctcaccggatccgaactccgaagtaggacacaccacacctgaacactgccaaggctcccgtaacagtgccacctccatccacaagaagaggacagatatcagagtattgcaactgtttgcatttaacagaagggaaccttggtcccatacccaccaggagaggaagagattcctgctacatccaccagaagaaaggatgagaagaggacagggtaaaaacacatccagcaacagaaaacccaaaatgacaccaccggagactaggaaccatacaccagcaagacctcaacatcacagtgcagatgaagcagaagagaaggaccttaaaaacatcttcatgacaatgatagagggcctcaaagaaatggaagaaaaaacaaaccaaaaaatataagatcaacaaatctctcaaggaaatagttcaagacgtaaaaactgaaatagagacaataaagaaagcacaatctgaggaaatgctggaaatagaaaagctgggtaaactatcaggaactacagatgcaagcataaccaacagattacaagagatggaagagagaatctcaggagctgaagacacactagtggaaatagaatcatcaaccaaagaaaatcttaagtccaacaaatccctaacacaaaatatgcaggaaatatgggctaccatgaaaagaccaaacctaaggataataggtatagaagaaggtgaagaaatccacctcaaaggcacagaaaacatattcaacaaaatcatagaaaactttcccaacctaaagaaagacatgccaatgaaagtacaagacgcctacagaacaccaaatagactgaaccaaaaaaggtctcctcaccacataataatcaaaacaccaaagatacagaataaagagaaaatattaagagcagcaaaggaaaaaggtcaagtaacttataaaggcaaacctatcagaattacacctgacttttccacggaaaccctgaaagccagaaggtcctggatagatattctacctacactaagagaccatagatgccagcccagactactatacccagcaaagctttcaatcaatatagatgaagaaaacaagatattccatgacaaaaccagattcaagcaatacatacccatcaatccagccctacagaaagttctggaaggaaaactgcaacccaaggaagttaactacaaccagaaaaatataggcaatagataatcccattataccaacagccaaaaggaaaaagggatagaatcccacacataatttcgccaccaccaccaaatcaaaaacaaataagaatgaacaatcaatggtcattaatatccatcaacattaatggtcttaactcgcctataaaaagacacagattagcagaatggataagaagacagaatccatccttctgctgcatacaggaaacacacctcaacttcaaagacagacggtacctaagaattaaagggtgggaaaagattttccaatcaaatggacctaagaaacaagcagggtagcaatcctaatatccaacggattggactttaaaatcaaaagagatgaaggaggttacttcctactcatcacagaagaaatccattaggatgaagtctcaattctgaacatttatgcccaaaatacaaaggcatccacgtttgtaaaagaaacattactaaaactcaaatgacacatgaaaccacacacccttatggtgggagacttcaacaccccactctcaccactggacaggaacaccagacagaaacttaacaaagaaacaaaggaactaatagaaattatggcaaaattgggcttaacagatatctctatagaacattccatccaaatacaaaaccatttaccttcttctcagtgccacgtggaaccttctctaaaattgaccacatactttggcaacatagcaaacctcaacaggtacaaaaaaattgaagtaaccccctgtatcttatcagaccaccatgttttaaagttagaattcaacaacaacacaaattgcagaaaacctacaaactcatggaaattaagtaacacccaatttcgcaattcctgggtcaaagaagaaataaaaaaagaaattaaagatttcatagaattcaatgagaatgcggacacaacatacccaagcttatgggacactttaaaagcagtgctaagaggaaatttcgtggcgctaagtgcccacatgaagaaacaggtgaagaatcacactagagaattaacagcacaactgaaagctttagaacacatagaagccaatacaccccggaggagcagacaccaggaaataatcaaattgagggctgaaatcaataaaatggaaactaggaaaacaatacaaagaatcaatataatgaagagttggttctttgagaaaatcaacaagatagacaaaccgttatccaaacttatcaaatggcagagagtgaaagtacaaattaaaataatcaggaatgaaaagggggacataacaacagacacagaagaaatccagagaatcatcaggtcatactttgaaaacctgtatccctcaaaattcgaaaatctaaaggaaatggacaattttctggacagatttcacttaccaaaattaaatcaagaacagataagcaacttaaatagacctataacccctattgaaatagaagcagtcatcagaaatctcccaaccaaaaaaaaaaaaagccaagggtcagatggcttcactgcagaatttgaccagaaatttaaggaacagctaataccattctcctcaaagtattccacacaatagaagcagaagagtcattgccaagcaattttcatgaggcttcaataacctcgatacccaagccacacaaagacacaactacagagtactacagaccaatatccctcatgaacattgatgcaaaaattctcaataaaatactggcaaatcaaatccaagaatacatcagaaaaatcatctaccatgatcaagtaggcttcatcccagagatacaaggatggttcaacatatgaaaatccatcaatgtaattcaccatataaacagactgagggaaaaaaaaaaacacacgatcatctcactagatgccgaaaaagcctttgacaaaatccaacacctccttcatgataaaggtcttggaaaaaccagggataacaggaacatacctcaacataataaaagcaatatacagcaagccgacagccaacatcaaattaaatggagagaaactcaatgcaattcctctaaaatcaggaacaagacaaggctgtccactctctccatagttcttcaatattgtccttgaagtcctagctagagcaataagacaacaaaaggagatcaagggaatacaaatcggaaaggaagaagtcaaactttcactatttgcagatgatatgatggtttacataagagacccgaaaaactctaccaggaactcctacatctgataaacatcttcagcaaagtggcaggatacaagattaactcaaaaaaatctgtagccctactatatactgatgacacattggtggagaaagaaatcagagaaacataatcctttacaattgccacaaacaacataaaatatatctttgggtaacactaaccaaataagtgaagacctgtaccggaagaattttgactctctaaagaaagaaattaaagaagataccagaaaatggaaagatctcccacgctcttggataggtagaatcaacatagtaaaaatggcaatcttgccaaaagcaatctacagattcaatgcaatccccatcaaaatcccagcacaattcttcacagaccttgaaagaacaatattcaagtttatatggaaaaacaatagacccaggatagccaaaacaaccctgtacaatagaggaacttctggaggcatcaccatccctgactttaagctctattacagagctatagtcctgaaaacagcttggtattggcacaaaaatagacaggtagaccaatggaatagagttgaaaaccctgatattaacccacacacccatgaacacctgatttttggcaaacaatccaaatttatatgatggaacaaagagaacatcttcaacaaacggtgttggcctaactggattcagacatgtagaagactacagatagacccaagcctatcaccctgtacaaaacttaagtccaaatggatcaaagacctcaacataaacccagccacactgagcctattagaagacaaagtgggaaatacccttgaattaattggtacaggagactgcttcctgaacattataccagtagcacagacactgaaatcaacaattgataaatgggacctcctgaaactgagaagcttctgtaaggcaaaggacacagtcagcaagacaaaatggcagcccacagactgggaaaagatattcaccaaccccacatctgacatagggctgatctccaaaatatacaaagaactcaagaagctagtctccaaaacaccaaacaatccaattaaaaattcagggacagaactaaatagacaattctcaatagaggaatctaaaatgtctgaaagacacataagaaagtgttcaacatccttggccatcagggaaatgcaaatcaaaacaactctgatatgccatcttactcctgtcagaatggctaaaatcaaaaacaccaatgacagtttatgctggagaggatgtggagaaaggggaacactcctccactgctggtgggagtgccaactcatacagccactttggaaatcagtatggcgactcctcaaaaaatgggaatgagtctaccacaagatccagcaattccactcttaggcatagacccaaaagaagcacattcctacaacaaggacatctgttcaacgatgttcatagcagcactatttgtaatagccagaaactggaagcagcctagatgcccctcaacctaagaatggatagagaaaatgtggtacatctacacaacagagtactactcagcgggaaaaaacaatggaattttgaaatttgcaggaaaatggatggaactagaagaaaccattccgagtgaggtaaccttacaatcactaaaagacaaacatggtatgtactcactcatatgtggattttagacagagtaaaggattaccagactacaatccacactgccagagaagctagtaagcaaggaggaccctaagagagacatacatggtcccctggagaaggggaaaggggcaagatctcctgagcaaattgggaaaatgggaagaggggggagggagctaggagaatgagaaggggagaagaggagggatgaggaggacatgagggagcagaaaggttgagtcaggggaagaatagaagataacaagaatggagatcccataacagagacagacattttaggtttgcagagaaatcaggtgtagggagccgtccctgcattctccattacaagatggcgcctgcatccggcaggcaccgaatgtaaacaagttaatgggcgcaggcactgggtaactttccattccttgatctctgcctattccgtggggtcatatggtccgatgagctgcagccaatcatagggtgacacgtccaaggtggcggttgtcagcctttattaggggacgggattcttggctcggggtctccgcttttgtaagcttatgttctctctctctcaagacgcattaaagctttactgcagaaggatcctgattagtgtccctgtgtcgtttttgctggcgaggcgatcgggcgggacaatcaggcactagggaaatgtctggagatctacaaagatgacaccagctaacaatctaagcaacagaggagaggctaccttaaatgccctcccctgataatgagattgatgactgactcatatgccaccccatagccctcatccagcagctggtggaagtagaagcagacacccacaactaatcactgaactgaactggcatccagatgcagagaaggacaagtgatgagcaaagggtccagaccaagctggtacaacccacagaaacagctgacctgaacatcggggagctcttgctccccagactgatagctgggaaaccagcatgggactgatccagaccccaggaacgtggacttcagtgaggaaaccttggaattctacgggacctcctgtagtagttcagtacttatccctagcacagatgtcgactttgggtgcccattccacatagagggatactccctgagccaagacacacgggggtgggcctaggccctatcccaaaggatacgatagactctgatgacaccctatggaaggcctcaccctccagggggaagcagaaaggatatgtgataggtagggttttagttgggggggggtggtaggggaggaggggagggagagggaactgggattgacatgtaaaacaaacttgtttctaattcaaataaaaaaatctgaaaaaatatagaagaaactttcctcaatttttgtgacaatctgcatgtttttttgtgggataggcaagttaaaagccaaagaaaactgccacagaatggctcccagtggggagagatttggtaatgtctcaggttcatctaagagaggctcatcaccaggaccagaaaccacagcctggtttgccagcacaggtgacagcgagggacattttattaactccacccctgcttttttttgagacagggtctctgtagctttggctggcctttggtttttcacatagaataggctggcctcaggaatctccctgtctctgcttcctaaatactggattaaaggtgctatgtatctggctgtgaggtactttttaatgctgatgtgctcaacattttaagttttgattaagaactcctatgcaaattagggctgaacaacttctacagtgagagaagaaagataccatactaaatttcttccttccctcccccctccctccttttcttctttctttcctcctcttttttttttttttttttttgagacaagttttctttcctctgtgtagtcttggctgtcctggaactctctctgtagaccaggatagccttgaactcaaagagatccacctgcctctgcctcccaaagtgctgggattaaaggtgtgtgctactgtcttagggtttctattgttgtgaagagacaccatgaccacagctactcttataagtgaaaacttgtaatttgggtggcagcttatggttcagaggtttggtccgttatcatggctgggcatgttgttgtacaggcagacaccatgctggagaggcagctgagagtcccacctcttggaggcaacaggaagtagactgagtcattgggtggtatcccaagcatatgagacctcaaagcctgcctccactgtgacacacttcctccaatatagccacacctcctaatcacaccactccctgtaagcttatgggggccagttacattcaaaccaccacagctactatgcttggctaagttttttttcttaacattgaattttggaaattatttaactatggctgctgacagagccagcactgctggaaaagtggtgaaaattcactcaggtgtatgaagcacctacataggttccctccctcgcagccacacaaatcctcctaacaaagccaaaaccaaagctacattgtgaccttgtcatttctactggcaggatcccagcttgtatgccgaaagcctgagtggctttgttattggatcctctgcttccgaacaatcctcttcaatggacctgtggtacaagcttcaaccatgagttcacttcttacaccttttaacaatctcaggtagacaataccaacagggagggagggaaggaggccaggagatggagactcttgacgcagtacaatcccatctcaatttaaatgttaaaaataagctagagaattaatttcaaaacaaaccttgtacatgtctcggggattaaataagtagtggcatttggttggcgttggcagcatgttcttacagacttgataatatatcgccagagaacaaagcacaagctggtctctgcatttctggacctcagctacgaagttattgagggagaaatacattcccaagtgggcctttaaggagaaaacataatactcagttcaacatttaaatgtatgctgtggctaatactcaccaagaagccgacttgtgaactttgatggagggttaattccagtaaagattgctactagttagaattttaggacaccatggtggcaagggagctcagaatgtaggtacggaggcgccctgagtgtgggaaaccgatcgttggggaggtttcagtgtttgtctcccggtctagaagcatgtgatatgggtgttctttggggacagttggtggcccacctctgtgcacagcatctccttgcttgcccagaggggtaggtgctagaacatcaccctatctgtactgccaaacacatggatttcctttggagagtccaggattccttgtggaaaaaaatggctcaaattgaaatacagtgcaaatttatacatctggcggatgagattacatagaccatagcaaatttcttcaaaattaatcttacattttctttctttgtaagttttaaaggtaaattaaaaccaatttccctctaatcccttatgatttggatgctggaaagcatgggctgcacctaaaagaaaactgttttagaagaaagtaagtgtggatgccaacccagatggtggaggagatcctgcctcctgcaaaaagaggcagagatgagaactacacggactcatgcagttcctgaggccatgccagacgcagggaacctgtcagaaagacagagttctaggactgcagtagattagacacgtaccgcagcacctctatgagcaccaaattgtgatttcaattttaaaagataaatcatattaatagttcagaagtataggagaaatacaatttatgaggacaaaaataattcctcagtgttagtgttttcaagttctcagtcttttcctcatgtttttttccttcctccccagtagaaaatgggctaagatgtggaagatagggtttatttcaccgtacagcttgtagtccccgtcatccaagagaggctgagcatgaactccaggccggaacctgggggcagagctgatccagaggctatggagtgtgctgcttactgtcttgggtcctcctggcttgctcaactgctttcttatacacccacgatgacctgcccaggggcgctcacaacaggctgggccctcccacaatcaagataacaccccaacttttaatcccagcacttgggtggcagaggcaggtggatctctgagtttgaggccagcctggtctacagagtgagttccaggctggccagggttacatagaagaaaccctgtttcaacgaccacacacacaaaaagaaaagattcactattcccaggtacgccaaggctttcgtccagttgacaaacaaaacaaaacaaaacaaaacaaaacaaaccaccaagcagtgtagcagagtacttatagcattcttgagaacctggctctcgcccagtgaagggaggggtgggtgtgagggtgtgagggcagggggggaggaggacaagctagacgcattacctggaagatagtacataacacggtctgtggaggatgaggtaataccagtatggagaagtgtttgaggaggcgtgggctgatgtcattcccactagcagaaggtgcacaggcagcgattatagtaagatcttgaataatctgtgggaagggttttaaaaagggaatgccatctgtaagaagtaaaatagatacccatttccccacctcacgaagaagaatttaggcaaacatttagaatactatttactataaagcaaaaattataatggtaatagaaacctgtgttcttcacaggtaacctgtcataaaatgtaactttaaggtaagtcacttccagcaggcttctaaatgtcatcacgaacagcccacttaaagaatgacaatcacttcaaaatgcaaaaccattagaagaaaacatgggggagagtacatctcaggaccctggtctgggcaaagaagctcagaagcgtaagagacaaaactaacaggcgtgtgggactaccccaagcaggaagtttctccacagcagtcgacagcatgagcagacagtgacaagggttcactgtctggagtataccaggaactcaaatatcccaacagcatccctacaacaaataatccaacaaaaaactgggaaatatttcaacacaagaaaacatgtaaataaccagcaggtaaacgggggtgggggtgggggtgggtgggtagaggagaaccaatccccattgagcctctgggaaattcaaataaaaatagtgagctatcacttcatcccagctagaacagctagtagcaaaaagacaagaaacggaaaatactggtgaggctgagaagaagagacattcttgaaaactaccagagggaatgtaattagcacacacatcaggaaaaacagggtttaggatcctcataaaaatagaattaccacatgatgttccagcaatcttactactgaatatatatatatatatatatatatatatattatatatatatatgcacattcaacagagattaaatcagtatataaaatatatctgcactgtgctattagtaacagaaaaaacacacaaaatcagtttaagggcccactaatggatgaagaaaatatgatatatatatatatatatatatatatatatatataatgaaatgccaccaaatcttaaaaaagagggaattactgtcatttgtaacaacataaaggagcctggaagatattatgctaactaagtgcaataacccagatacagaaagtaacatactgcctgactgcactcatttgggagctctaaaaagtgtagtagtagctatttcccactgataaccctaaatgcaaatgttttaacttcccaattaatgcagactagttagttggataatgtcctccaaaaaacacagctcactcacaaaaagtctccaagagaaaggacagaaatcaatcaaccaagcaaatgaaagcaagattcattcttagataactgctaggataactgatggagcatgctgtaactgaaaaccttcagggaggcacaagacagcttaacaaagtaagtgatccaccaagaagccataacaattgtacacacacacacacacacacacacacacacacacacactattggaagttccaagttcataaaacaaacattaatggatgcaaaaggacaaataggtttggatgtaacagcagggggtgatttcaacagcccacttctgaaacaggtcatcaagattaaaaactagtaaggaaacttcagcgtaatctataccacaggttacacaaatttaacagacatttacagaataatccacacaacggctgtggaatccacattattcttaacaccatgtcaacttcaaaaaattattcacattttagtccataaagcaagtcttagcaaaatgcaaatgtactgaaacaatttcttatcaggtcatagtggaatgaataatgaatatagctataagtgggacatttctgtgaagtgaaaaggaatacacactcaatgtccagaaacaagagaaacaccaagagattatacaaagtgctcttgagtgaccaatgagtcattggagcaatcagggtgaaaataacttcctacaatcaaaagaaaatgaaagcacagatctcatcacagtctttagggcaatgaaggaagctgtagagtaacagctcatagctacaagtgagtgtttacattaaaaaacccagagaaggcactgggagggagcaaattaaaacaaagtgtaacacagacacataaaatactatagtgaagctcattactttgtatgacgacttaaaagtaataaaaaagatgaattggatcccaaatgaataactgaaggacacatctcaatgtcttagaaaaacaagaataagccaaactccaaagccgccatttagaaagaggcagctcttaacaaatggtgtttggaaaactggacagctacacatagaagagcaaaacaaaatccatctcttgacacagtacaactctagttataaagaagagggaagctgtgctggagagagggtttcagggttaggactgcgtggtgctctggcacacagctggagttcagttcccagaacccacacagcacagctcacagcagccaggggatccaacacaaacccacacacagacatgaactcacacacataattaaagataaaaaccaaataaacgcacgaagccaaaccatttggagagtggtagatggagctggagatcactattacagagacaaatacataaaggaagattgtgctttctagacgtcaatctaaatcaaacaaacaaatacaacataaaagtgggaggcagcctatgagagaagaaggaggcataaataggggagggagaaaaaagagaggataacgggggagcagggaggaaacatcacgcattgtctttcatatatatgtacacatgcatgcatgtgcgtgtgcacacacacacacacacacacacacacacacacacactctgtcacacacacacttaaatccagatttgacatgacagcaaaaatggaacaacttgggggaagggaagggaccactgagggacagggatgagagagggtgacaagtcacggcaagctacaatgacagaaaggcatgaaaatgtcaaaatgaaacccattgttttgtattaatttttaaaaaaggctaggctcctgttcactccattgaagtcagaacagaacccagtctatcctgataggttgcttttgacactcctggtccttcccatgcccgtgctggggcttcagaaatcccaccaaagacctgctgtgactattttctggtcactgtagggtttttgcccaggtttcctgttttctcctttattttcccacctctctccaattctctctggagggctacattgggactcttcctctcggccttaggtgagtggtgattcggatagtctggctggtgtcccagccaatgccactcactagccagtgtgcttcactgggatccgagcttaaatctcctgagacgtcaaactttttgcaacacagtcacctcattttacagaggagagatctgaggattggatagttgaaatcggtggagtgagttttggaaccaagggcttttgatttccagagaaggaagcacaaaagggtctcaatagtaacatgtttatgtaattagactttctaaattcttcactcaacctttctgtaagcgctctgtaacagtatcaaatgaagagaaaatcttagtgtatactgtaccttccatgtatttctttcagtatcataaatcccacccatttctaataactgtctaatcaattccaggggtggctgtgctccacaggtatctggtgctggcatattcaagtcatcaataaatattacaatctgaagggggacaggatgtttcaaagtattaattagtacaaccttttaaaaatcttgaattacagatattatgctatttgttcaagaacaaaattatatgcaataatctgctctttaaaagttaaaagcagaagatcaaatctattttttaagctatgatcttagaaaacagcaagcattcaaaccagcagaaactatgtgcccttggtccctaaaacaactatatggtggtactcaggaatgcttttttgttgctgataaagcaatctaactgtggcaggcacctctggacatgccagctcactaagcatttttattttcatgtgcttactcttggcaaggccctgctgtagaatctagctcttctatttcatatgcaccatggtttgggaagaaaattcagaaacatattccagtttttaaatctgtattactttttaactaggaaaatattatgcagtcaagggtattgatcagaatctgtgtgcaataaacttttctttgtggaataaaaatataaatagctgctttaatttcccagtttgtaacttttttggggggtggggtggggcagggagagcactgtttcccctcctggaatatagactggcagtcatgtttctaactggcagcctatcttttctcatagcgtgattataggtttctgaaagcctttcagcctttcaaacctcctgaagtttattcgtgtaggcaaagatctaccagctttatctaaatcttcagttgaagtcaagggaacctgaaatgaggccctaagacctgcttacagtgacacagggactcctaggggcccctcatttgtgaatcttgcaaacctcttgaccctgaactaacttcttggtactgtatgggagtcagtgatcataaattccccttgtgagtcagatgataaattgtcagttgattccgtgccaagcagcctggaggtgaggtgacgatcacctgatgcccctgggcacctgccttgttcccacacaagtcattcaattcccttcatgccttctagagtccctgggttctacaagtccctcttttagagccccactagaagaaagtgagctagaaatgacagcaccaaaccattaccggctacctcaggttccaggcaacctttatctagattttggtgcttttctttcttccagtcttagtaattctcaccaggggcaacctaccacactgtaagaggaattgatttaaaaaaaaaaatcaaagtccccattgtaagtgcatttttaaacagcgctcaggagtgtatgttctccattttacaaactaaaacaaaccaattcattacttgactcgtacaaacagagggctcagaggtgctatattaccctgttgtttttcggggctccaagtatgtctttggttcttctgactaactttcgcagaatcatctccttggttctggtcactgtcatattggtggtaaaatttatggtagaaactataatttctttatcatttttaactgtggtgtcatcagttttattctctattttctgcatatctgtaataccaaatacaagaagagaaacaaatttagggcagtttaagacatgtttgctctattttagggtgctaggaaatttgaaacaagcaattttatcttgctgttattcttttaatgacagtgctccgagagagggacagctgctttccatgggtccataatttttcactgtagatggcacgtcagaaaccacagctcgtgcaatggtatggaagatcttcccatcgtgtgttagccacgtccaactgaatgatggtaaagcagcgggcaggactcattcccagaggcagagttatccagagggatgtgtaggatgatgttacaggagtttaagaccctacactgtccctggactcatgcttctgctgtccgtcccggcatgagaactccagaatggtgactttctcctgcattatgctggaaaccagggaggaaccgagccagactgcaccttctagatccttcttgctcttctaccagggcagcaggagtcacctgtgggaacacacagtctcctcccccatagcctcttataccttttcaggaggtttgagtgggtcttggataacttccaccaggttgtattttaaatgaacaattcagtttttttttttctttctttttctttttttctgagacagggtttgtctgtgtaacagccctggctgccctagaattagctctatagaccaggttggcttcaaactcagagatccacctgcctctgcctctgcctcccaagtgctgggattaaagcgattctagcttttactctgtaacttctcactgtaaggaatggctttgcatatggccacaatagacaagttttgatcccgtatggtcacacttaccaaaacctccgagagctgctttgtaggtctcagcaagcaagaggttgatattcttccttatgctgttgggagcaaaagttttaaaggaccccgaattagtttaccattttagctgcagtaataaaatctaatcaaagtagcagcacaccattgattttacttagatttctacaagaaaacatttctttttctgctcacacttttatagtcctaagactgctccacatgccatttccttattcagctggaaaaaaaaaaacaggcttctctagtattttaacaatgtgtattttaacttaattttagaaatgtgtttcatttcagaaaattttatttgcaaaagaagtttatatttttcttttaggaagaggcagacaaaattcagaatgataggcacaagctcctgatagaaagtcttgtcatatttcatatgtagaggacttattctattacaacaaactgatattatgcaaaactttgtgagtagatgagatgcatttttttctgggaggaaaagagcttatggttgcattgtttatgttatgtaaaatgtgtggttctaaacttagttatatttaaaataaacgcaagtatatctgatttaaaggaatggatccagcagttaacactctggaaacaaagtaaagattttcctctaactagaaaatcaaggtgaactaataataaggaggttaagtcagtgacaaaagtcctccctcaaagaaaagatatctcacaactgtgtggtttcacactgtggggttttactttgcatggtttcacaccgacttctacagattttttaaagaaggatggatgctttgctcatatgctaccagaaaatggaggtagaaggagtatttcccaaatcatcacatgaagacagcattgccctggtaagaaaacactattaacaaagaacatttctggacagtatcatttatgaacacagacgcaaaaatcttcaacagaaagctaacaaacccaaacttgacaccacattaaagaggccactcattcctcatgatcaagtgaaatttatccgtgggatgcaaggatggtccaacatatacaaatcaataaaagtgatgtcacagtagtaaaggggcagaagctataatgattatctcagtaagtaaaaaaaaaattatatattgaaaactataaagaagttgaaaagtcacacaaatatctggaactatagccagtattcatgatttagaaaaatcaatactgttatagtgtttatactgcccaaaactccagggtatatgatgctcacttctggcctctgctggcatcggcatccacacaaaccccaccccagacacataattaaaaattcaaataaaaagaatacaaatgagtgttaatcaaagcaacaggatagtgccatagaaagagtgaactgagccaggcaagaagtattcaattctgtgtagtctccactatagtgagaatctgaagaaagctcaactcactgaagcagaaagaggggtgggtgtcaggggctgaggatgagcgggaataaatagggtgtctgaggaatctgatttcaatatgtgtcacctggaagtcactgttgacatgtactgcaaactgcaggaagcgcaggttaaagtgttctcactacaaaatgtaagtacatgaggtgacaagcgtgttaaacagctgacatcattttataatgcaagcatacactaaaacagcccattctcacaaatatatatatttgtgagaatatatatatatctatatatatatatatatatatagagagagagagacagagattgagagacagagattgagaaatatttttcttattgcctcataattctcatcatcatataaaagatttgagtcagggtttctctgtgtaagtcttggctgtcctccaactagctcctatagaccaggctggtcttgaactcacatagattcgcctgcctctgcctcccgagtgctaggattaaaggcatgggtcaccactgtctggcaaggaaacagtcttaccagaaaagtcaaatttaaagatatatataatatatatatatattaccatgatcttttaatttcattatgtaacaggacttttcctaaaattgactcgaattttatatcaaatgttcctcgaccctctagcttttcaagcatctcactgatgaccacagtcttcccgacaccagagtctcctaagggggagggagatacattaggttagagtcacatgtcagaaaattacacacgtttgtatgttaaaatgaactaggagcatatttattcatttaattggcacagaaagcacatttttgctcttccgttttaaatgtgagagaagttaattagggacttaatgtggatttctttcaaattgtttaatttatattcttacaaaagacagattaggagataattataatttttatttaatgctcatttaagcccatcacaattgtttctggcttacagcatgatagacctacattaaatgaaactctttggacaaaacaaaacaaaatcaatttgaaaaggacattttatgtgcagcgagtactgttatctgtacgtgttcatgcagcctgtgcacgactcagcccaagagggctgaagactctcctggggctggagttatagatggttaggaactgtgacgtgtgtgctaggaaatgaccctgagccctctgcaagagcagcaagtgctgctgaccccgggccttcagcccactccatcattttgcttttgtgagggaggggcttattatgtagcctagggtggccttgaacccaacaatcctcctgccttggcctcctgagtactgggattacaggcatacatcacaacacccagttcccttattattattatttttttttgctaacacaatctaaggtggcatttaaaaataaacgtattgaggcagagcaaggactcatgactccaagttcacaaagtggaaaaattcaagtttccttacagcaggtcagaggcaaatgtatgtgtcatctgagtgtcatatcactgaagctctttgtgtgtgcccctggggacattattatttgctactggtgatacacagcacaggccagagacaagaaaaccttagccaatggattggataagtatgcagaatgaacaggaactgtattgagtctttcctttagtaacagtgaaagattgtaaagttttatgccatgtttacaagttgcatgttcaagtttaattagacaattggtgttaccagaggtggtcctctaaggatcagggcccatggactatggcagtcaaccacatagtcatcggttgttgatatttctagaatttgtcctttatgtaacgaaaagatggaaagaatgtaaacatccaagtctggagtggtgggtgtacccataattccagcacttgggaggttgaggcaggagatcacctgctcaatggcaggctgggctgctcagcaagagcccatctaaaaaaaaaaaagtggggtggggaaggaggaagacaaggaaggtacactggcagcttacaatgtcccctgttaaagtggctttcataggctgttggtaagatggaaaattagtctctctaaattcctacttaaacatgattagattcaataatcgttaaacttcttcctaacttagaaatcccgttacttattaagacctgtgagaaggacagggtaggagttcttcaggagaaggctcatgacgaaagagaagcagatggtgtccctggtggcagtgtagttcacacactccccacattccttcatcttcatcacattgtcactggatcccaggaagtcagccagcagcgaggtccctaagggcagaaaacagtttttaagttccggatgacctggaatgagaaagcaccccattgtttttgttactcaatactttttgggcaagttagtaattaccttgtaagttttgtatcctttttcctcttgtaacctaactgctgtgtcttttcaaaataacattaacttaagacatatgcttcaaaatggcaaaacattgctcaagtggattattttgggtttttgtttatttctttaaaagttttatttcattattttatgtgtatgagtatttctcctacaagtgtacctgtgcacggtgtgcatgcctggtgccagtgaaggtcacaagagccctagggctggagtaaaagatgacagtgagacatgggtgtggcaatcaaatccaggtcttcagcaggagcaacaagagctcttaactgctgagccaactttccaggcctggttttgtgtcttcattccgcattttttatttgtagaagacctattctgggctagcaaaacgtctcagtggtaaaggctctcgctatgcaagctgggtaatcctagacgtgtttatttatttccacacaattgccacagcaacacgtgtgtgcacacatgcatcatgcatacaataaaaatttcaaaagctctattattctttcctaaattgaccatatcacttaaatatttcctattattctttcctaaattgactgtatcacttaaatattttctatgttacctatataggtgttttgcctgcatgtctgtctgcactatgtgcatggagcccagaagagggaactggatcccctgggactggagtgacaggtggttgttaagactttgtgtaggttctgggagctgaaactgggttctctgcaagagcacccagtgttcttagcctccaagccatctctctagccctgatattgtcatgttctacactttgtgatacctttcaagtactttcaagctggctttttatttgaagacccggcacaggttgccttgggtgggtaggtggatctcatcgcacacttcacctctccctctcagcagtgttactgggaggtccatggcatctgccaaagccgccttggctggagctgtgccgagcagtgttaaactgttaggagaactccttgcaggccaggcccattggcagcttcagcataccttttcctccaaccacattaaactctacagtttctacattggacagacgccaccatggagtcttctttaaaacattttaaaatgtatactttatgtgtacatggtcagatacatgccacagtgtatactttagtgtgtatggggtcagatacatgccccagtgagtgggtagagctcagaggatcctgtgggagtggtttctctgtaccacgtagattcagggctcagactcaggtcaccaggcttggtggcctttatccacggagccatctcataggtctggattatttttcctaatggctctataaatacaacctcttgggcatcacttagatttgcaaatccatgtctatttctgatgttggatcatttgacggtgctgaagactttggtagtggggactttcttttccatgcctttcctgccagccatggctaaggaggctgaggctgaagatgccagggctgtggggcagtggcaacagaggccatgttttcacatggacctctggcaagcaggccactgctgctgtagttttctggaggcagttgccttgccaacctggctcccgctgcctctgctgtcccccagcaaccccaatctcgtgctcctcaacttacaatggagttacttccagtaaacctatgttcagggagtatataggctgttaccctgaggttgtgggtagggctggctgggagctgcagctactggtgactacccagtgctacaggagtcattgcttctgactagcctgggaaacgatgcaaactggaaataaaaaactcatgatttctgttcaacgtttatgggattcacaccactaagagttgaaaactataaagctgaaataaccttaattttaatgaagttttgttgttaagttcttgccttcatctcctaccaagctctcatcattcagaaagtgtaaggaatcttctgtgatatgcagaagcagtttgcaaataaaagcaatttagagtccatggatacttataacataaaaattagaccaccgttctctacttgtctgctgttgctcttatgagatagggtctaatggccagaccagcactcactatgtattccagactggacttggactaatggctatcctcctgtcgcagccttctaagtgctgggattccaggggtgaaccactgtgttacaccttattcttttttaattggtggctttgcttacaaccaagtacacgatcttatgtgtgtgttctccttacttttaaagagttactttccttggttagtggttagtgaccacatctaattaaatcagtagataccattattggttagtgaccacatctaattaaaatcagtagacactgtcatctgagagtctctgcacactgtagctctataatgtgtctaaatactctatacattttaaaattatttatttattttatatttacaggtgttttgcctgcatgtatgtctgtgtatcacatgcatgcctggtgcccaggaaggccagaagaggacatcagattccctggatcttgagttacagatggctgtgagctgccatgtgggtgctgggaaatgaacctgggtcctctggaagagcagccagcactcttcatcgtggaccatctctcctgctcctactacacagttcttatataatgttctaaggcaatttcaaggcacattttataaatatgagtaaaagctgtccctacaaagatacatattggaacatggcaaatcttggcgttgccaacacatccatttttatgattaatacaactccagaattttagataagttacaaacctttaaaaagtaattatacttacctctttgaattattgtttgagcattgggaattaaatctgaccaaggcataaactcacaattctgtaagtccacaaaatacccaaatatagaccgttcgccacctggtaagttgatacccatgtctgaaaacaacacacacaagaatccaataaggagtggctcaccaaagacatgcgctctacctgcaagttaagggttcgtgagccacgagtccactcaagttcacgccactatataaaacaggcagcccatttcctcttaatgctggtgtgtacaaaagcaaaagtttaacttttaaacttttcgcatgtagaaaagagtaagttatgaccaaatatcctatgaaatcttatcccagagttcttgttattactgtgtgtttggatgctagttaattccagtaacatactggctcaggtcaagccaaagtaatacagaatgttgaaaatatttgtaaatcatatttctttcccatttaaaaagtagtatttactaaaaaaattcttgaaaatataagaaagcaaaatagattaaccatagttttatcaaagatagcagagttactatttaactggatagatgtatatgtctaatcatggttaatatattaatatacactgtgttagtttttatagcttgtcttttttttttagtttctttagagatacattaaaaataatttgttatgatttctttttctttttgagataaggtcttatgtagcccaggcttgagtcaaacttgctatatactctagggtgacaactgctcctattttctaagccccggggttaaaggcatgagtcacaacatgtcacttaactatgactttagagttcatagctatctctcagaatccttagcattttgttgataaaactatgatgttaaattcatatgagttcacaattgctttgtgagttcttgtgtatgtcatacatgcatatgtgtgcacacatcaccttgggcacacatgtggaggccagagtaggctatcaattgtcttctgacactgttcgctttattgccatgagacactgtggctttccctgagccataaacctaccatttggctaggatcattggtctctaagtccttccatctccacacctcaatgctggggctgcaagtacaggcagccactcctggctttttgagtaagtgctggggattcgaactcaggtattaatgcttgcacagaaaatcctgttaccctctgagccatcccccaacccccccagtaggttgctattatttttaaatatagtgttcttcaatctgctttaacttttttgctttcatcttactttactgctccctctgccttattttgtatttgtatataacatatatttattaatttacttgtagcattctgtttgttttaaatatactgatttatatcttgccctgattaatccaaagtttgatatttctatcccacaaagaccttaacattctttactcacaaaacacacttcccacaatcttcctagtttgtgtataacttagattttacacttttagcaaaaacaaatgatttagtttataattggtaggcaactgacctttttctgaatcatcttcaaataattcacgaacaagtctgtcaaaattataggttacttctgcaagagaatcaggttcaaattttgaacgaaatatcacgtcttcctcatgttggtcttcacgctttaaaacccctccaaatgcccacgtaaaagcaaacacaaagatcttctgaatcattactgttaacttctcagggtttttctccaaataccacgcattttcatcccggtagtagctgtgtgggaaggtgaatgtcaaaagctttataagtggttggaaaatttatttcagcatcacatcaaagttttgttaaaaaattgtaataaagtattcacataaaattttagatctaatacataatgcttccttagatagcagccacataagttactgtgtttatttttaaggtagcatatatgcaagacattcctacttaacttttgtttcatatctatttttggcaatatgttgacatatttaccatatacctttatttaacataaataattctattgcacatatacctttaccatgatatacttttatacatgtttgatggtttatttgatacatatacatgttttacatatgcatgccatttatttagtttttatatgtaaacctttttaattttaggtcaatttacagttgaatgtttacttgttgggggagaggataattcatgaaagacataggaaatagtgatccacttggtatttctcttggccagtcttcagggttgacttagttcaacatggctgcagaccagcaggcagattctgaggagactgttttctagttgaggttaatctggactccacatggctaatgagccatgaattttgtggtggcaggattgatgatgacaaggttaaacaggagggttgagcctaatttctaacatctttcattgtttcaatagtataaaaaatgtaaattgtgaaaaactaagatatatcagattgaaattcattagcaactatcagcatatagcatgttggcataattctgtctggaacatcttgctgtgtataatttagcaaatacttattaaatatttgctatttatcagccactctgaactaaatggacatgatgccatcttcacaggccagggaagaatgaacaaaacacagagttgtgtgagataagaggagtagtagtgggctaacgtgggcagcagaggtccttgtgctcacaggtaagtatgaggggaacctggagtaggacacagggctgtcccttcaagggaaggaaggctgggagtggacatgcattctaacctggtggattttgaatatctgtgagccacagaccacacaggttctccccgagactcttctcataggcttgtttgtctcaatctacagaacctatctgtatggaaggtgtcacatgtaccttaccaaagtttcgatacagtcatccaattttttttttttagcttacccttgttccccaaagagatttgtgaatgctttttcatgtgcatggggtttgaattaattatcaccacaaatgttttcatcaaattgcacactgtgcttaaatatgcctaaaataagtcactggggtcagactcccaaagtttgaaccagcaccagctacctagtcgtgttgagctgaactgccttcttgactgctgtggcttgtcactctgctggccatggaggttgcagagatttagactgtggactcagcaaaggtcatcatccagaagaaacataggagtaattccatagctgtaatggatcatgcacctaactattgacctaactaatcgagacagctggcatgtcacattgtcattctagttttgtaagcgaggcaaggctttaaaaccttataactggctcaacatttcatagtttataaagggctgatacatgaaataaactcacatcaattttattccatcctaaattgtgtaaaggcaagatgaatattttttataacaaccttactatgttaaagtaccatgaaaatgtgattatcttttattagctacagaggactctaagttgggataaaataatgtagactttaatattatgaaaccacaaaatatggtttactgacaatgagcctatgtgtccttgggtgtttcacatctaggaaggtctctaaacacatttgctggatgaatggaactcaccattttccttcatccttgaatttgactttcagagtttttggatctttagttgggatgttagcttctccatcatcaccttagaaacaacaggatttttgtacaattaacaacagccctaaaatcccataggctaattaatgaggctcaactgataacattgtctagcttgaactgccatggaaggagtctttcctgctggagtgtcacaagcagactgtgcatccctctctccatccttgctcctgactcattttgtgcaagtcatccattcaatagagaaaagcagaataaatcatgactcgttctttatagcttagctttctaatatttgtgtgaatattaaaatatgtctcttttagaatacttcaaaacagaaaagtgtgaagaaaaaaatgataacccagtttcactctcctccataaccatcaaaatatcattgtaattacttactgaataacaaagcacacaatgtattttcaattttaaactcataaaaatgaagagacttgtattcttatcttgctctttcatttttaaggctgtttttatgccattgtccttggaaatatgattttgttgtagcagaaattgttaagccaatctcccattgttggaattcaggttgtttttatgactgtaaatagttgtgctgtgtataaacctctttgtgcacaaacctttgtatatttctccagttataactctataaaagatcctagaaccacaatgctaaggtgaatttatcagtattttcagcatgtattggtaaatagctttaacaaggttgactcaattggtaccttcctttagggtcatactctggtacattccagacatcaatgtctatcaagggtaaggaagtgctcacagaccgcaccctttcctgtggaactaccgagtatttaagagttgctgcagcaggtaggtgttgtttccttcagtgcagtagccattgaggagccagatgagaagtaaaaggagtttagaggaaacatatctcttatattatccattttccttctcccaaagccatgtttttaacaataaaagtggatgtggtggctcaagcctgtaactccacatggaggaggtataagtaggaggtcatcctggttagaagttcagggttagcctgggctacatgaaactccatcacaaaacaaagcaaaagataaaataaatctgagttctcttttcttactaccacctgatgggggaagtgcttctgtgtgtgggtttgtcttaatggatgatgcataaagcactgtttggccaatgaggcagcaagttaggtggggcaagaagtcaaggaggattctgggaaatgtagtaaagaagtggtgtctcaggcaggaagtgacatagcaaggagactcatatataaacaaggcaagaaggaagtgggccccttctctcttcctccaaagtcaccatgtgagcccggaaagacaggacacttgtcgctggcgtccaataagataagtcttataaaatatatagatttatattaattaagactgatctagcagatgagaaatcctagtcattggccaagcagcatttgtacctaatataagtctctgtgtgttattttggccacccacgtgcaggcagaactcaagccggtggcggaaagatttatcgtaacaatcacctattgaaggaaacggttgtagttccctgtggagaaagctcagtgtaactgtgtttagaaacttcctgtgatgttacagagggtcccagatgcctcttcgtttgtaggttgttgtcttggcttctagctcaagtgtggaagtggtttccttcaattcctggtctctcatcttttaagcctgtggtactttactgactttgtgtgtgtgtgtgtgtgtgtgtgtgtgtgtgtgtgtgtgtgtgtgtgtgtgtgtgtaacaggtatcttcatagtttgagaatcatttctgctcctctttggctgaatctcctggtttctgggggttacagtcactatgaaccacattatcctagtgcttttttctcttcattgctattggggtcttactgtaagctctggtgtacagaaagccagcactgaaccttttgccagaaacatcttccccaggaaataagagtgattggctttaaagtttagatcagtatttgccacatactttcactttaagagtttgggattatttgtttcatttttaagcgctagttctgaactttaatgccctgagagaagggactccagtgtctccagattggagacaccaagtgcttcccaggacaggatcaaaacatctggcgaccagttcatctaggtgggtgatgctaacagccaagctcaactctaccctcaaagcaagcaaaaagaaactgacccagaagacatcaccaggggaaggttgttttccctcttcctggaacctataaacatgactactaaaggtgccacagaaacacatgggggagaccaacctctccctcaggtgctgcataggagctgagcattattgaaagcgctactaaatgctgttaaaaccagtgttaatgtaaagactaagttattgtgagcattccacccgatgtttatcttcctgtgaatgagcatataaatgctgggggactgggtgatgagatccccctcgacagctactggactctccccctggtaccctgcagcagtctctgggcacctgggtagttaagcacagtggaaacaaatgccaggaaaatgacttcttcggcaggtctgcagaggtacggtgtcctggaggtactctcttctcaaggaaagtccttaaaatgaccttattctttcagacctttgaccctaaaattggtgggggtccagctaattcctgtgatgtcattaaggcatctttcctatcttccaaatgcaaagtgtttggcttcttttcaacagattttttcagaagccagacctgttagagccccaattttaaaccagccttttgagaaacttgcacccacccctcccaagttttctgctctactttttgttccagaatctcactataacctggctatgagcagctggcaatgacaacatcagagctggaatgctatgctgtcccagaacctccactgccaaattaatcagtataaacatttaaattcagcctcacccagtctcacaacatggacaaaacattctttgaatgtaacctgggtggacggcctcaagtctagttctcaattgaggtctcatttagacttggaactgcatggcctggccttccctgtccacatccttgctggcattctggtcttagctcccacctgagtcactaagttctgcttacattttagggcttctgcagtccagtatctccgaatattttcacattctggaaaccagttctacaggcttaaggatcatataggcagggttagtgacagtaatgagccctcactcctggcaccacttttctattagtcatttttcccatctccatgacaaaatgccgggaatgaatggtattaatgaggatggattcataaggcttgccgtttcagccatctcagtccatagtcgctagctgaggtgattctgggccttggtggagcagaccatcgtggaggtgggatgtctgggaaatgtctggttgttcacctcattgtgaacagcaagaagagagatccagcgagccagcgagcgaggaaggagccaggatgtgattctgctacctagcgaccaagtttcttcagctagcttgtaacaaaaactcccaacaggtgagcctttcgggggaggcacaatgaaaccacagtgatagctaaggggtgttaagtgtgccttcaacttaaaacacatccttaaaacacaacattcttgagtaatcaagatcttctaaagctctctatattcttttttaaaatgaacctcaacacgtatgttattggtttacccctgtggatgcgcgtctctgttaaagggtttttagcttgttctatgtacatgttggctgttaactcaatctacactcttctcgctttcacttttctttcataaaacctactaggaagtgacaagctgccactgaagagtggagacataatttcgtcagtatgactcagggaaaactcactttttgcggttcctctctttatttgcatgaattcaaataaagcgtctagaatcctgcagagagtcatgatgactgtcaaatcttgtatgggatatggtaaaaactttctgtgcctcttcaggaaatctagcccttctttaacactttttttaatcattaatccaagacactccattcctcgctgacttatagtttttgaagttttcacaagccatgacttaatgtatggctcccatcccagatcaacaggatcctaaaaagcaagagaaaacctcatgaaaacacaaatatatggcagtctttttttttttttaactttcacttcattatcccccacaccatggctagattcagatttatttaaagctaaaacagcagcagcagcagcaacaacagcaaagaaaaaaaaaccacaactaaaggaatcacaattctctggagcaatcttgctgttttaaccatggtttgaaaagaagacaagagacgggaatctgaaacgggaggcctgctggggtgggcaagcttcaaggaaccagtcagcctaggcagccccagtcctcattctaatccaaaccccaaatcatgtagattagatggccaatcacagctgctagtgagtttcatgtatggaattttggggattatgtttactagttccagatcactgtcttggtaatgttttcccaagttctgagagttgtacagtaaggatggcttcagggcaatctttcctttgctagtaaaagaattggtatcaatggcctaccttgtctgcactactggtgttctaactccccagggtaatgttaatggcagttactacttctggattatgagactttggggggaaaaccaagtttctgagctactgagtttactcatcagggactagaaggcacaactgagacaatgggctgtcaccctgaacaacacgcctttaccaggaccgggctctgaaaacttgccatgtacaccactgcacagcgggtgatgacagagggggtggcgttggcgagagagtccacctcaaaaatcaccctgatcttgctcgttagggtgatcctttcgctgtttgccaggcacagcgttctgttttcatcgagcacagtgttgagattttctatccataaggtatcaactgggccgtctaatacaatccactgccaatcgaaatctgcaaagagaaacatttccagtgcagctgagactaatctctgatttctcttgttacagtctcgaaaactttctatcatattagaaaacagcttcctgtgtgtgtgtgtgtgtgtgtgtgtgtgtgtgtgtgtgtgtgcgcgcgtgcacgcgtgtgcaatgggcacacgtgtgagggtgtgtatacatgtgtgcacacatgtgctgtcagaggccttcctctgcccttctccccttttgctcatggagccatgctctttcactggtaattttggctggtctagctggccacttctttctcctggtctccgatctctgcctcctgaatattgggattacagatgcatacatacctgtttctgcttggattctggggatctgaactccagtgccatgcatgtgtgccaagtactttatttactgagctcccctcacccccaaccccactcctgacatctagaaaatcttttctaagctgcaaatatcgattgtccctggaaacactggagggagtgcttaggtgacacttgtgcatatgttgggcatgcttggctgtcatgaatgggacacatgcttatacaatatgctttatttatgtatactctccagtattcattaacgtcagtaaatacactatatgtatgaaattgctttaagcattttctggacattcttagattattgaaatgtataattaaccctcaaaatttggataggagaaagacacatagttctataatttgtcataataatatgatttgtgaatttgcatcttccactcaagaataggttttgggtatgctgttgctaggcaatatcaaagaatcaagtagacagcttaaactgtcacacttagaacccaattcctccctttcccacactatcatagtctccttggggtgatgtaacaccccttcccatgcaatcataatttccctgggctgctgtaacaccccctttccatgccatcatagtctctctgggctgctgtaacacaatgtccctgactgggcagtgtataaacagtacacatgtgctcgtcacagcactgaaggctgagggatgagatctaggtgctggaagatcatctggtaagcttcttggttcaaagagggaacctccctcttgctgtatggtcacgtgacaggaagattcgtcccccttgagtctcttttacaaggacactaactccatcaggagggtcagagcacatcttgtataagacaccaaacccacacgcaagggcacatccctcaagaccatttgcatttcccaaggccctaccttctaaactcattagcttgaggattaggattttaatgtataaacttggggggaagaagatgcaaacatccagaagacagcactgcatgctatactgacaggcatgtcaatgattttagagtacctctcagccagggtaagggaggttgtcatgcagacagaaaacagttaagcacccagaagacattcaggtgtccttgatgaaccaaagagcaccatgtaggatccagacagccactgataaggagatgggctctttctgcttgaaatggcttgccttgccattgtcttaaaacctcctaagaaaaacttactgcacccaatcattgtactttcctcaaaatgccatcccaattcccaggaaagcagatgcagcaggaaaagtggaccacaaacatactgctggcggatgagccattgtgaggctcagtctggggtaggaaaaggaggcccaggctcttccagtagagaggcagctcctacagagcaggggctggattatgcgcccactctgcgcattagcgatggatctgctggcattgtgtgattcaagctggcaatgcacagatggcatcacaatgctgctgggagactgtgagctgccactgctgcttctcatgccactatttctgccatcaatgtcatttcagtcctaactattcataagctgaaaggctacttaacctctactagttctatatcataataggatacgtaactactgcaaagctgttatgagattagaaattttaagcaaacacacgaggaagaagtaaattgcacaagaataaaaatattactagtaaaaaatatagacatgaatgcagttcatgttgactcaaaacttactatctacattaacatgctgaatttaataataacacttaccacgagtttctggagttttaacatctttttctattgtcttcataaaaatactgttatcagtatctgctgtagcagagacaccaacttggaaaatctaaattatataatgagtaattaggatgtaaacattgtactagcatttttctgtctttatcatcaatgttaagtagttattttaatatgggcttcataatttagaaatgttttttgaaactctcatggtaaatacaaagcaaagaggagatgcatttagcaagtgactgtaaacaacataaatttatggaaactcagtgtcagagtatcaggtatacagaacaaatatcaatagacttaaaggctgaatgattctagtacattaattcaagggactttaacattctattttcaccaatgtcagaacatccagctacaaaatcagcaaagaaacagcacagatgaacttcaccaactggaccttatgacatgtggtataaagcagcctacccaacagctacagggactcacacttcacatcggcatgaacaacaccctcctcagtagacagatcacaacatatgtcaagtcccccaaaattgcaaaatattatcatagtgtttatgaccacaatgcaacatctgtaacaacaaaaccgttgcaaagtatatgctagatcacattaccttgaattcatagacacctacccatctttgccttcccaggcattgggattaacagtgtgcaacataccatgcctagtgcaacttaacttcaaagaacaacagaatgattgaacttggtgatataggcttgtcatcccatctacttaggatgctaggaaagaggcctgcctggttacacaatcgagtttgaggtcagccaggataattagggagatcctgcaccagaaaagggggaggggtgtagatggggctctcagtggcagaagttgtgttgcccatgcacaggaccctgaattcaactacagttctgccccacataagacaactggccctttgaagacataagcaaaaacaacaaaccttgagctgcattaaggagaaaacttgcatgaaattagagatgaaaactgagacattacaacagatgccacagaagcagtaaggattaataaaaatttaaaatgaaatgccaacacacctgaaaacataacataaaagaacaaaatcctagacaaaatctcgccaagattgaatcaaggaggaaaaaaaaaaaaaaaacaaaaaactctggggctggagagatggctcagaggttaagagcaccgactgctcttccagaggtcctgagttcggttcccagcaaccacatggtggctcacaaccatctgtaatgagatctgatgacctcttctggtgtgcagatatacatgggagcagaatgttgtatacataataaataaataaaatcttaaaaaaaaacctctgaaaggccagtaaagagtaatgagacagaatcagtaacaaaacattcctcttcaaacaaagtccagaaccagatagctccacaactgatcagaaagaagaatactaattctccctcgatatgctaaaaagatcaaagagaaaagaattcttctgacttattccatgacaccaaactgaaaagaacacaatgaaacagaaagcaatgggctaatgaccttcatcaaaacaaatgcaaaattcttgggcaaaacaccagcaattcaaatacaatattacacataaaggatttagctatgatcaagtgggatatatcccaagaatacaacatgccttaacacatgcaaatcaaactcatcatcatgtcatacatacatacaaactcataatgctatcaaaaaacaaattgcaaaaatgtattatcacctcagtagataaaaaaaaaggcatttggtaaaaatttagcaaacctttatgataaactgaaaaagatgactccattaagaacatattgctaaatgtacttcatgagtttgagacaatatacgtggttcatatagtagacagatgactcataactttcaatatagaaagcatcatatttccaatataaaaaatatcatcagcttaataaaactgcctctttaaatgactaggagtccatttttaaatcaaagggatatttaatgtagaaatctcaacatgctcagtcattccttggtatctaaaggggagaccgtttctagaaagccccagaaaacacaaaaatagagggcttaggtaccttacataaaacggtacagtatttacacacacaacctacacacatcttcatgtcggggttactcagcctaatacaggttaaaggctatgtatgctgttgttagattgtttaggagacaatggtgaggaacacttcacacagacaccattccatttccaaatcatttggatgtctttttgggtgaatctgcaggtgaaattcatagatactgaggtctaattatattctcaaattgtcctcattctgtttgtagattactttgtgagcagatgcagcctattactttctatctttgctaatccctttggtttcaaatatcaccttttgctgatatagtttacctactgaaaattaccaataatctatagtttacctactgaaaattaccaataatctcacacttatttagttatgagaacacaactttccattttttgctacttatatttactgtttaacaaattttgcatcaaatagtttactcttttttatgttttacaaaattagcctcattctttaatttgtaaggtacattagtgatacttgatcacaaggttgttctctatttaggcttaattctttttgcattcccttcaacaattaccttcaactttgttctatgatttactgaccatttaaaaactacagagtaaccctgtcttgacaagccaaagaacacaaaaagacacccctaaaacacaatcccccaaaacaaataaaccaaactaaaccaaaatacaacaaaataaacttacactagaaaaatctgtgattcttgacaatatcccgagagtactgcctctcttggagtagtctgcagtgctagcattcacataatttcggattgctgctgctaataacccatcactccattccatggtgttaatgttcagacgtccgtatagttcactaagagtgacacactttggattcaaaacacaaacatctacttttcctttttttcctataatctgaggacaggggatgagaaatcaagattgtttttaaaaggatttagttatactacaattatttaatttttttgcactgttgttgctaacaggttttagaagaaatctttacatcaaacaaaacatctccatataggtagttgttaacaagaaagagtaaaaatggacttgtcttgtttaaataagacacactataaaaaccattaaaacaatctaaatagtacaagtggcttcctcaagaaaagacatcttactccactccattgcagaaaacatactttgattgggatgtgtatgttgggagactgggtagagtgtagtgaagccagggagcagggtgtaccattagtctactcggatcttatccatgggtgcttgggctccacctgaagagctgttctctgtttcatctcatttggatttaagagtgaaggggacagacatgatgctgggaaatacagcctcacacagcataaggcaagagattaagagattatgggtacaggaatccaagttggtttctttgggaaataagacagaaaaaaacaaaacaaactagacactccaccttctgtactgcggcgggcgggcacccgagcctcaggtgagtctgggcactgctctgcccccacaacctcccccatcaacctctgttcgattctgcctgaactaccccccccccccccgccccaagaagagtggacctgcccagatggaaggcccaccctgagtctggacacacctcatccctgtccaccctccgccctgctgtgggcacccaagcctcaggtgagtctgggcgcagctctgctccccaacctcccccatcaaccactgctcccttctgcctgagcccacccaggcaagagtggaactgcccagactgggaaagcccaccctgagtccagaaacaccccacccttgtctacccaccgccctctgccttccggctgccgccagaggctgagctctctgcctgccacctgagagagggtgagactccattggcactcacagcaagatctgaaaaacccaacacagaggatgaagaagagacagacctcaaaaattatcttaggaagatgatagagacctttaaagaggaaacaagaaaatcccttaaagaaatagaagaaaaaaacaagcaaaaaattacatgaaatggaggaaaagacaaaccaaaaaaattcaagaagtaaacaaatctcttaaagaatctaaagaaaaccaagaaaaaacaaccaaacaagtgaaggaagcactcaaaacagttcaagacatgaaagctgaaatagacacaataaagaaaagacagaacgtggggatgctggaaatagaaaggctggataaacgatcaggaactaaagatgagagtataaccaacagaattcaagagatggaagagaaaatcttctcagttgtggaagactcgctaggggatatacagtcatcgaccaaagaaaatcacaagtccaacaagtccctaacacaaaatacccaggaaatatgggacactgtgaaaaggccgaacctaagaataataggtatagaagaaggtgaagaaacacagatcaaaggcacagaaaacatattcaacaaaatcatagaagtaaacttccccaacctacagaagggtatgcctatgaaagtacaggaagcttacagaacaccaaacagacaggaccacaaaaagaagtcccctcaacacataataatcaaaacacaaaacctacagaataaagagaaagtattaagagcatcaaaggaaaaaggccaagtaacatataaagggagacctatcagaatcacacctgacttctcaatggaaactttgaaagaaggtctggctttcagataccagtttgtggataccctacaaacactaagggagcatggatgtcaacccagactaccgtactcaacaaaacttgcaatcactacagatggagaaaacaagatattccatgacaaaaccagacttaatcaatacatatccacaaattcagcactacagaaagttctggaaggaaaactccaacccaacgaagatatctattgcctatgttttttgagtgtagttaattcaattttaccaaacacaaaaagaaacaggagggtgaaatccacacacaatgacaccaccaacaataaatccaaaacaaacaagaaccaacaatcaatggccattaatatcgctcaatgtcaatggtcttagcctgcctattaaaagatacaggctaacagaatggatataaagactgaatctatccttctactgaatacaaggaacccacctcaacttcaaagacagttgttacctcagagtaaagggttgggaaaagaatttccaatcatatgggcccaagaaacaagctggtgtagcaatcctaatctctaacaaattagacttcaaactaaaaccaatcaaaagagatgaagaagggcatttcatactcatcacaggaaaagtccatcaagatgaagtctcagtcctgaacatctatgccccaagtacgaaggcacccacatttgtaaaagcaacattactagagctcaaagcacacataaaaccacacacacttatagcaggacttatatagttcaacatcccgctttcaccactagacaggaccaccagatagaaacttaacaaagacacaaaggatctcacagaagttatgacccaactgggtttaacagatatctatacaacattccatccaaacacaaagaatataccgtcttctcagtgccacatggaaccttctgtaaaactgactacaaagttgccaacaaagcaaccttccacagatacaaaagaattgaaataaccccctgtatcttatcagataaccacgccttaaagttagaattcaacagcaatacaaattgtagaaaacctatgaacttgtggaaattggataacacccaattgcaccattcctgggtcgaggaagaaataaaaaaagaaattaaagagttcctagaattcaatgagaatgtagacacaacatacccaaacttgtgggacactctgaaagcaaagctaagaggaaagttcatagcactaagtgctgacatgtagaaactggagaaaagtcacactagagaattgacagaacaactgaaagttttagaggcaaaaaaagcaacctcaccacggaggagtagatgccaggaagtattcaaactgagagctgaaatcaataaagtagaaacaaggaaaatattacaaagaatcagtgaaacaaagagttggttcgttgagaagatcaacaagattgacgaacctctacccaaactaaccaaaaggcagagagagagcatgctaattaacaaaatcagaaacgaaaagggggatataacaacggacactgaggaaatccagagaatcatcaggtcactttgaaaacctgtactccacaaaattcaaaaatctaaaggaaatggacaattttctggatagatgtcacttaccaaaattaaagaacagataagcagtttaaatcgacctataacccccaatgaaatagaagcagtcatcaaaagcctgccaaccaaaaaaaaaaaaaaaaaaaagcccagggccagatggcttcactgcagaattctaccagaaattcaaacaagagctaataccagtactcctcaaattgttccacacaatagaagcagaagggacattgccaaactatttttatatgaggctacaatagctttgatacccaaaccacacaaagatacaactgaaaaagagaactacagaccaatatccctcatgaacatcaatgcaaaaatactaaacaaaatattggcaaattgaatccaagaacacatcagaaaaatcatccactatgatcaagtaggcttcatcccagggatgcaaggatggttcaacatatgaaaatccatcaattaaatctaccatataaacagactgaaaaagaaaaacatctcactagatactgaaaaagcctttgacaaaatccaacatctcttcatgataaagatcttggagagaacagaaataacaggaacatatctaaacacgataaaagcaatatgcaccaagccaacagccaacatcaaactaaatggagagaaacccaaagtgattcctccaaaatcaggaacaagactaggctgtccactctctccatatctcttctatgttgtacttgaagttctagctagagcaataagacaagaaaaggagatcaaagggatacaaattggaaaggaagaggtcaaactttcactatttgcagatgatatgatagtctacataagtgacccgaaaaactctaccagggaactcctagagctgataaacaccttcagcaaagtagcaggatacaaaattaactccaaaaaaccagtagccctactatacacagatgataaatgcaatgagaaagaaatcagagaaacatcacccttcacaatatccacaagcaacataaaatatcttgggggtaaaactaaccaaaaaagtgaaagacctgtacagtaagaactttgagctgtagcttatttagccgggcattggtggcgcacacctttaatcccagcactcgggaggcagaggcaggcggatctctgtgagtttgagaccagactcaaactctggtctacaagagctagttccaggacagcctccaaagccacagagaaaccctgtctcaaaaaaccaaaaaaaaaaaaaaaaaaaaaaaaaaaaaaaaaaaaaaagaactttgagtctttaaggaaagaaactaaagaagagaccagaaaatggaaagatctcccatgctcttggataggtaggatcaacatagtaaaaatggcaattttgccaaaagtataatctacagattcaacgcaatccccatcaaaatcccaacactgttcttcacagaacttgaaggaacaatactcaacttcatatggaaaaacaacaacaacaacaacaaaaaacccaggatagccaaaacaactctgtacaataaaggatcttctggaggcatcaccatcccttacttcaagctctattatagagccatagttctgaaaacagcttggtattggcacaaaaatagacagaccaatggaatcgaattgaaaccctgatattaacccacacagctatgaacaccttatttttgataaagatgctaaatctatgtcaatggaagaaagatagcatcttcaacaaatgatgctggcacaactggattcagacatgcagaagattgcagatagatccctatctgacaccatgcacaaaacttaagtccaaattgatcaaagatctcaacataaatccagccacactgaatcttctagaagagaaagtgggagatatccttgaacgaattggcacaggagaccgcttcctgaacattacaccagtagcacagacattgagatctacaattaataaatgggacctcctgaaactgagaagcttctgtaaggcaaaggacacagtcagtaaggcaaaacgactgcccacagactgggaaaagatcttcaccaaccccacatctgacagagggctgatttccaaaatatacaaggaactctagaagctggtcaccaaaaacaccaaacaataaaattaaaaattggggtgcagaactaagtagagaattctcaacagaggaatctgaaatggctgaaagacatttaagaaagtgctcaaaatccttggccatcagagaaatgcaactcaaaacaactctgagataccctcttatactggccagaatggctaaaatcaaaaaacaccaatgacaatctatgctggagaggatgtggagaaaaaggaacactcctccattgctggtgggagtgcaaacttgtaagaccactttggaaatcagtatggcagttgctaagaaaaatgggaatcagtctacctcaagatccagcaattcctctcttgggcatataccccaataatgcacgttcatacaacaaggacatatgttcaaccatgttcatagcagcattgtttgtaatagccagaacctggaagcaacctagatgcccctcagctgaagaatggatagagaaaatgtggtacatttatacaatggagtactactcagcagaaaaaagcaatggaatcttgaaattcacaggcaaatggatggaactagaagaaaccatcctgagtgaggtaacctagtcacaaaaagacaagcatggtatgtactcatatatgaattttagacatagagtaaaggattaccagcctacaatcctcttcaccaaagaaactaggaaacaagaaggactctaagggaaaaatgcatggacgccggagaataggaaggcacaggaactcctgagcctattgggagcatgagggtaggggggagggagctgccagaatgagaggaggagaagaggagaggagaggaggaaatggaggagcagaaatattgagttgaggaaagaatagaggagagcaggatgagagataccatattagagggagctattttgtaggtccgaggagagatctggcactagggagatttccagagatctacaaggataacacaaattgacaatctaggcaatggtagagaggataacctaaatgcccttcccctatagtgagactgatgactactttttatgccatcctagagccctcatccagtggctgatggaagctgaggaagacacccacagatatacactgaactcaactctggaacttagttgcagagagggaggaatgaagatcaaaggtactggtactgactgttgaaacccacagaaacagctggcctgaactaggggagcacatcgaccccagactgctgtctgggaggccagtacaggcctgatccagacccctgaacatggatgtcaatgaggaggcctctgcactctatggggcccctggtagtggatcagtatttttccctggtgtaagaagggactttgagagctcattccacatgaagggatgcactcttggcctggacacatgggggaggggctaggcctggccgaggatgatgtggctgactttggggaggcccctgtagagggccctaccctgcctggggattggagggtcgatggtgtgggggtaagttgtgggtggggagatgggatggggggaggggagggagagggagagggagagggagaagggattgacatgtgaagcaagcttgttcctaatttgaactaataaaaaaaattacaaaaacaagcaaaaaaactcccaaaaccaaaaccaaaccaaaccaaaacaaaacccagacccgtagtgaggagtcatgaggattcacagacatctaatatctattgaaacagtgtgttatatcaaccagtaaaaagacaaaatagagactacagttatgttaatttttaaatttaaacttattttatgtgcataggtgctttgtctgagtactgtgtgcttggctgtgtctgtagaagccttgtctggaacagaagttacagaaagttttgagctgttatgtgggcgctgggaatgaagcactggtcttttggaagaaaatccagtgcctttaactgctaaactgtctctccagtgccctaactagttccaatcatcaaaaactcaaagttttggagaacagaagcttataaatgtgataaagaataaattattagagataaatgtaacatcatattgaaatattaaatacatttcaggtaaaataaagaataaaactatagttgacacagttttggaggggtaattaatgtaattacaaaagaaaaatcacataaattttggaaaagagatataattaattttatttgaagataactgtattaatactcaaagaatgaactggggcttagattaattcagaaaagagcaaaatacaaaatacacaagtcaattcttctattttacggtccttatcaccagtttgattatctaatattcagaattctcatttactacaatgatttcttactacaaaacttctagcaataaatcaagtaagtagttaaaacaccaatgtagaaggaatagataaggcataagccatgcagatggaaaatgcttaatttagtaggatatttacctttgagtcagactgaaggtcttgaattgacaaggtagatgcaataggaaggattattaaggctttctctaaaattttcctgactgtagtttttcctccacctgttgtgcccacgagcatcacaccaacacaaacctaaagtgaaattcacagattagtgtgctgaggaactatttccagtttctctaccagcacctgtcttgcttgtacccatcccgctctcccttcatatgactgttcaatccatggcagtgtggctctctgctttattgtatcagctaaggctgaagggagaagcaatatcctaataaaagaatacctttaatttttggagaccccaagatgctggagatgccagagtcatgggacacctgcctacgagagctgctgacagggactggaaacagcccaagagagagaaatgtgttgcagtcaacaaagctgaaaagggttggagatctgaagaacattctgacatcagacatggaaatgcagagtttagagtttacccagatagttttcagtcttgctttggttcagtatttcctgtgttttggaatggtaatgtatatactgtgctattatatgttggaagtatgtgacctattttttttattttatagggaattacatttaagagattgcatgaatgtcagaagtgacttttaactttggacatcaaaacattactgagactgtgatagactattgcattatgatattgttacaagcttctggggctaggaagtggagcgtgggagtttgaatataattggcccctataagttcatagggaatgccaccagtaggtatcactttgttggagtaggtatggcctttttggaggaagtgtgtcactgtgggggcgagctttgaggtaatctaggatcaagctttgctcggaccacttcctgttgcctacagattcaagatacagctcattttgtcccctcagctccttctccagcaccatgtctgcctgcatgctgccatgtcccaccgtgatgataatggactgaacctctgaactgtgagtgagccaccccaattaaatgttttcctttataagagttgccatggtcacagtctctttctctacagcagtagaaatcctaaggcaatgaggtaaaacgaaaatgcatttgggttgtagatcctattagcaagagtaactgtggtcaatataacattgttctcttgggaacattcactggaagctaagacactaggtaaatgagaggtgggtgctcttggggggtggaatcatggggcattgacattcctacatgctgttggagcagaggcattggcagcttatgttttcaagagtgtaagacagactttgggggtgagagtgcttcagattggctgtagggtcttaggcaagctaaatatgcacactaacactgaactatactccatcaagcgcaaatttgatatgtagactgtatatttaaaatgtctccatcagaaacaaaagttgggtattcttgatgccagtattaataccagggctgggtgcactaaacccaaggttctcatcacacattgcccatgtacgtcggttaccaatccttgtgtccctttgaccattaccatcgcagcgagtggtgtaaatatgctagtccgcctactggtaccgttgtaaccaattgctctttgtctctgatctaggaatctagttcttctgccgataggaagacaggacagtgttcacttcacaagccacagtgtggtatagacactgatggagaaagaggagccaataaactgatgcaccagttttactagatgtgcaaaccagacgtgctatggaagtagcaagaagacactggaaaactgtctttttgagaaaaaaatctctagctgacaccttaaaaataactccagacaacttaaaaatggaaaatgaaaatatttaaaaattttgggaaaaattcatagaaaatgtctttacaaagatagttgaaaagttttttttgtttttaaataagacacagaatgctgaaaccatgaaggaatagaacctactgcactaaaattgtcttcaatgcaacttgaacatagtaacacttctaaaaagttgagacgtggagaatttacttataatatacacagccatcaaagaattatgatgtaaaacacacgagaagcatatcatttcctaagaaaaagataaacaaccaactgaaaaatgagtacagtataaaatttggcaatccacacaaaacccaaacagctaaaagtatttaaagagacatattctctcacaaagaatcaggggcacacacattctagtgtctgtgaaaatacacagcatatatccacagccaggaagaacaggaagtttaaagatggcatggcaataggatacaggctactttagactatatttgcagggctctgacaagtatatattaatgaataaaagaaaaaatcattctgtcgaattaaggtgagatacaatgtctaggaaaacatttaatttgccattgtgcttcaaagagtacaatgttccttctctactgttctgtgttttcacctttgaccttactgactgaaactcaggtaaagaatctgctgacatgccattctatacttacctcaagttgatggtacaactgtgtgatcttttctttctgaggcagccaatgttgaaagcctaattgttctgttgcaatagatattgctttctaaaaaatatagacatattaaagtacattataacttaacatctatcaatctacctacctacctacctatcaacccacccacccacccacctatttactgcagtcttggggatagaaacaaggtccttgtacaaagtagcctaatgaggcaccactgggccacacccccagcccaaaggtttaaattgtaatccctcggaacctcttagctacttattattgtagtttacagtagtatttctccattctttttttaagtttacccacttctgtctttgtaaataataaaaagcattatttttctcaccagaaatgtgcaacgcacagaaaatttttatgttcacagacctttggtagaaaattcataaaccctccctcagacgaagaatcctcattttcagattaatatacacaatcatatgcacaaaaccacaaaaatggacttagcacacggtgtttatacattagtgcatatatttgtatcaataagaaagaaaaagaggccatcagtttcgagggagtgaggagggacccgggagggacaggacggaaggaaggaaagagggggagtgatattgcttcaggactatgtatgatgttccctggagggaggtcaaaaaatggggggggagggagagagaaattttacaagtggataaagaaagcggagtccaaaagataagaggaatagcttgatttgcaccagataaaagagacttttaataaaaagctagaaaagcaatcaaaaagtgtaatcacgggcacacctttaatcccagcacttgggaggcagagacaggtggatctctttgagtttgacgccagtctggtctacagagtgagttcctgtacagccaaagctgttacacagagaaaccctgttttgaaaaacaataaaaacaaacacacaaaagattaatcatgcatgataaaaggtcaattcagtcaggtgatacaacaggcataaagtatttgtccctaatattgctgtccctaatgctacaggagtaaatatcggtggacttcaagggacagggacacccaacacagcagcagcagcagcagcagcagcagggcacttagcattccacggtcagcataagcagagtacccacaggaagttagcaaagaaatgccagagttaaatcgtatcctggaccaaaggtggcagcagactctcatagaacactctgtacaacagctgcaaatgcagactgcttagcagcacacggaaaactctccatatacattttagagtcagccacaaaaagcaagcatcaataaagtaaaagcaaacatgaaaccacgtcaaataccatatacatcttagagttgaccacaaaatcaggcatcacaaaatttataaaaaaaaccatgaaaccacattaaatatcatttttgcccacaacagcataaaatcagaaggcagcaactagaggcacttggaatactaaacaaatacaggagctgaaacatggtctagaagaacccgggggttgtgtacatgcatgcaccactgagaacatgtgtgttctcctgtgtgtgtgtgtgtgtgtgtgtgtgtgtgtgtgtgtgtgtgtgtgtgtttactggtaggatctggggatcaaaatcaagttgtcagacttgactgcaagcccctccacctgctgaaccacttcattagcccagaaattataaaatttatagagacaaataatggccacacagtatgccccaaatggtgcaattagagcaaaagtagaatgtgggcaaattgataggaaaaataacccaccactgaaaaccagctggagagatggctcagtggttaagaggactgactgctcttgtagaggacctaggtttgattccctgcacccacgatgtggctcaaactatgttaactccagttccagaggatcttatgccctcttctgcgggcaccgagcatgactggtgtgcatacatgcacataggcaaacaacaacaacaaacaaacaaaacacacccagacacatacaaatataatttaaagagaagatttcaaataaataacctaatattgtaccctgaggattaacaaacaagaaacaagagtaacccaaattccaatttagcagtaagaaaaaaatcaaaaaagtgcagaaataagcacaataaagatttaatatacaaacgatgagtgacagacgcttccaatcagtgtgaatacatgggcatatgtgtattgatgatgcaagtgactgcattcatgtatgcacattcacgaggcaggcagaagacagccttaggggcatcctcagaaatgtcgtccgcctctttggagacagggtctctcattggctggagctcactaagtaggctttactgactagccagtgagtctctgcctgtttccacttccccagcggtgggttttaaacgggtgccaccatgcccagctttttctgtggcttgcaaaggttcaaacccagcttttcaggcttttaaggcaagcactttaccaattgaactatggaggccttctttttaaaataaaaaaaaaattagatagacaaagaaatgagaaaactcatataaataaagctagagaccaaaaaaaaaaaaggagacattatgatagataacacaacgataaaaaggatcattagataaaattatgaacaattgcacaccaacaaataaaaaaaccaacagaagaaatgaacaaatttctggacatatacaacttaccaaaattgactaaggaaaaattagatgcctgaggaaacccataaaaataaaggatgagactgaatcaataagaaaacgtttcccattaaagaaacacccaggaccagatggctccacaagcatttaaagactaaaactaattcctttctaactctcttctaaaaatatgaagggaatgaactcttttaaattcattgtttggggccagcatattttgataaacacagcaccacagcaaagggggtaataaagataatatccttgagaaatatggttgtaaaaatcctggataaaatactagaaataaaacccaggagcgcattcaaaagctgtttcactgtgacctgtggagattcactccagtgcagaaagcagcaaatgtcctcacactaacagaacaagggaccaaagccatgccatcacctacacacacacaaaatttgcaaggagaaaattctagtcttccaaactcccaatagcaaaaaagaaaactaaccttgaatttcgaaaaaaaaaaaaaactttctcaaaaagatggaagctccagaagaaggcaaaaagagatggcaaggagtttggaggcagactggttagttaagaaatccataatgcattccagcagactgctgggtagtctaagaaagaagcaaacaccaggagagtatgaaacaggataatctcaagaaacaggacactgaaagctaattaatcaaattaatacatattaactaatttgtcaaattaattacatatgctaccaatacatttaaaagcagctacaaagctgcttaattgttctttctgaaataactatggaaaaaaaaacacctctcaagtcaggtctaaggcaaagtaatccatacattttgaaagtctgaacagctgggagagaggaagcaacaggggcagaagtagcagggagactgttagcaggtaaaggcggcgagtgcagaatatgctggaagatgacctggctgccggatgaaggaagccagtttttgtcaataattttgaatttgtgtgtaaggcaatggaaagtcaacgctggttttgctcatgctatcacacataccttaagggatgaacttggggaaccttgtgggaacaccccaaatgcagtaaacacataagaacggttaaggtctcctgataacagggagcaatcaccgtgcttttacagtgaaaccagtaccatcacttaaggactcagcattttttctgcctattttttctttccatcagtcacggtgtgctgaaagctccttctcccctggtaaaactatgtcggcagtgtctcccatattacctccaagtattgtattacctccaagacaaggtgttgcgtcttcgacactgttatcccaggaaaggtatcttcaatgatcttttcaaaatgttggacatcttcaggaaggcactttgataaagtagctctttggattgactcgataatgatcagagattcatctgcttcagaaagatcgtcactgtagcagttgagaacaaatccaaattatttctgcagtgccctttcctcaccccaaaccctccgatgtcccttgcttgctaaatgaaagctttgggaattcccctaaggaatacaagggaggaaactgcctgtgtaggcaggaaaaattacatctccccagtgatgtactcatttcttagaactgctgaatacgttttaacatggtaaaagaatgagtttttttgtttttcgagacagggtttctctgtgtagctttggagcctatcctggcaatcgctctagagaccaggctggccttgaactcacagagatccgcctgcctcttcctcccgagtgctgggattaaaggcgcgcgccaccaacacgcggttaaagaatgagtttttatctgttattacaaatatgttcttttgccgattctagattttgtttaatgtgtgtgggtgtttggcctgcatgtatgcgtaccgcctgtgtgcagtgcacacagaggccagaagaggatttgtcactgacaggtgtcagctgccacataggtgctggaaattgaatccaggtcctctggaagagcagctggtgctcttaaccgctgagctctctccagccccgtagattctagattttgacttttggttttaaaagtcatatgaggtctgtgatggtcgcttttgactgtcaacacaatgggatacagaatgaccatggagacaaacttcgactcacatctgggagtttctagactgggttaactctgttccacccaaatgtgggtgacaccattctgtgggggtctggactgaattaagaggaaaaagtgatctgagcttcctcaatgcagacacaatgccaccagcatctttcagctcctgcagccatgatggattgtgggggtcaacgtaagccttctcatcgagttgccttgatcaggtattttgccatagcaatgagcaactccctgacaagaggcccctggttcagtccccagcactgggacaagagccttctctactccaagggtatagaagacactgtgttcctcttgacagttttatggttgaggtttgcttacatttaaattccacaattgcttcaggttgtcttggtgaatgctgtggtgcatggttcccacttgacctttctgcaggcggtggccccacactcaacaatgatccgctctgggtgacggggttatgagacaccacgtgtaccaggcatgcagtcctgcttcccgactttctacaccagtccagggctttgtccattgacaaccagcaccacactctcaattgttgaagtttcccaacatagcttaatacttagaaaggtttgtctccttggtttctcttgtttttccagtattttaaaactacttttgtttatttttccatgtgagttttagaatcagtttgtttaaaaacaaataacaaaaagtccctttgcttattctcggattatggacacatgcaacattgcctggccttttatgtgggtgctggggatttgaacttgggtccccgtgtttgtagaacaggcacccatatactcactgagctgctgcgttagtttcccttttttcataaattaatgccagatatttaaacttttatatcttaagatgccttatgttacaagtggctatttattttagtcattcacatggattttcaccttgcagtcttgttcgttccagtatcacccactggtacccaagtctggatgttcaagtcccttacatagaatgctgtatttgtgtatcatctgcacaatcctcccatgtcatctctaggtcagttacaatgccccaaacactaacactgtatgaccagcaatgctccattgattacagaacaggaaaaaggtgcatgcctgctttgtgcaggtacgatgttatctttctcattatttttcttcatttatctatatgctttattgcatttaagtaacacacaccttctaaagaataggctgtgctaaggatcaggaatccatgttttggttcatttttgttcttttgataccactaagtgcctttcagtccatcttactgtggtgctctggtagcttcctgtttttgcttgccttatttaaaattgtataaattatttatccagcagtatgtaactctttgaacctaacactaaattcaagtttcaactgaccgtttacactcccgtttcttcttttctgccattattaaaactgtctttaagatcttcatgccaaaatcataatgatcctgaaatacatattcaatatctgagtcactatagttctgaagaagtagaaccatttaaaacagtcacacacacatgtgcacattaataaccatctattctgtaaagggggtttctataggaatccaaaactaactctgcctctaatgcgctcatttcctgtctaagctggtgctcctaaaagtccctttgcctatgtcctggtcctccctccctccctccctctctttctccctccctcccgagtttaactatgttatccagcctggccttgaactcttgggctcaggggttcccattgtctcagcttccccagttctgaggactacaggcacgcactgctgaactcaggagaagcctctcttagaagacagggtagggtaagtgtaaaagctacagcatctgtgttaaactgtctgagaactagaggggagggaactggggtataacaagaggaaaggatggctttgcagaaaatgcagttagctgtccaaactattttgggttggaagtgaattctaaaccccagaacgattctcaagaaggagttggactcaaatcagccttgccagtaactgaacttgcaagtgcagtgttgggttgtgcaccaacatacagaatcagactgagtgcttgtgttttcacaagtcctctaagttactgggatgtacaaagaactggaggacacagatctggaggccgacatctctgagcagagagaacaaatgtggtttgaatatctttgagtaaaggccaaggaccatggatgcatagccactctgaagacagcatccctggtttacagttggcctggtcctgctgattccaatggtggacctgtgtctgagtcacctttatagacctggctgtaagtgttaggagagaggcagcccctcacctgttttgagagctgcttgtcagctaagtcatacaggttaactagctttgcagacagtgatcttgaagatttgaagccaaatgaaaacagaaatacttcaatgataactttgtagtggggcaccatcattgccactgggcgaaacagagattttaagttacctgggagttcaactcgacctttatacctaaagaggaaaagaaaaacagcaacaataataaaaatccaaccatgctttgcagtttttcaaacttgaaactatattactttgcccccaaatgattctataggctttctgtgcaatccatatgtgaaaattaggtgactttcacttatcatcctctgagcatgttggcctatcatgtgtcccgtgtctccctgtatggcttgcctcatctcagtccttctgattccagtgcagctcttgttcagatgtttgatgaacccagccttaagtcagaggctcagtgtaaccgcccatatggacagggtggagatgttacatccgttcatggaaagaggcggctttgggcgctgtgccagctccacgagatggaactcttactcggcacctttgtgaatgctaagaacctgtggctggacaggggtcggtccctggagagctatcagggttactctgcacactattaacctgactcctagggattcatccttacggctacagagtagtgcattttggccctgggcagagaaacttcgtttacagtagatggtgacaggtacaggctcacaacgggccaagctgaagagaacagcaaattgcagagtcctcggccaccaagggacatcagcatcacaccacccccgcccccaggctgaaggaccaccatggaaaagtcattggagagactgctagatgcagaggtggtgggtgactacaatgaagcagtgttttacagggcactcatgacataaaaggtagaagccacctttttcaactagttttcagataagggtctcatagaaagtcaacagaatttttttttttttttagacggggttgggtgggggagtatatggtgtcaagtttgaaaaagtctacacaacagagcggttgaacacatgacctcccaatggtggtgacagaatgcatgcctaaaacctaagattgaaccaagcaaaatcccaacatggacaggggaggtgggcactgagccccatccctgttggaggtgttggcaattgataattgtgggggagggagagttagttctctttagcagtgtggccctggtaggctccagtggatagtcacacacccaagattatatttggtaacactaactggatttgatttttttttttaaaatgaggatgcaaagttgtttgcatatagaatgaggggtgggcctgggaggggtggaggtgaggggtgaataccgtcaaagtacaatgtgtgaaattcttaaagagttggttaaaaaaagattctggaggatgaatggtaggtacatggtatcggacaacccacccaacagatgagcttggagaaaggaattttagtctgtgtatactgccattagactcattgatatttacccaggatttaaggtaataaacactgcacatgacatattgagacgtatttctttcccctccagtagaaacctaaaagacagaaaagtagcatcattaaaatcacttctctaagccaggcagcagtgccaaacacttttaatcccagcactcaggaggcagaggcaggtggatctctgagttcaaggtcagcttggtctatagattgagttccaggacagccagttctacacaaagaaaccctgtcatggaaaaaaaatcactcctctaggccaaagggtactaaaactataataaatcaggggaattttcttcagcctttattacactaaaatccaaggaaaacatactgaaaacaacagagaggaggaggtggcttattttgaaccaatgttgagttctgctgggcttcaggcatatttgatggtatccaaagatgtccgagaagcttctgggcctggatgttcgaaggcactatcagatgattggtccacacagggaagagacgaagagactctgggaagactgaaatgagctgggcctggaagactcactaggaacacagtggcagagccagagtttctacttggaacccagcccacttccaacctcctttttgccaaaccatggggactatagagtgctgggagatggttcagcactggctcctcatcctgcaggcccaggtttggttcctggcaccaatatggtgcctcccaaccacctgtaactcctctgtgagagtacctgtggtgcacagacatccatgtagggaaaacacccgtaaaacaatagtaaaatctcaaaaaattagaaaaaaaattggataactgtgaggcagatgctttgccaagaccacaggtgtcctgtctgtggtaccacaggcagagacaatggtgacaatgtctggggtgatttcttgccaaagaggacagtttaaatatgagaggcagaacaggcagtacacagctggacagtccctgggcacaaacttgccgaggttaaagcacagaggaaggtggtaaactgggggttactgtgcccccaatctgtatccacagacctgtaagccctggtgacattagcagcatgacagccaccagagtaaagttagcatctgtcatcatgggtgagatgacatattacagaacatccacctgcaccccagaagccagtcacatgagcttccgagtgcatccaaagggaacacgtgcttattattcataaacagtagccctaacatgcatacattttatggtagttttccaaataaaaagcaccccagtttagaatggtgagatggcaccagtaattctgtctttttttttaatgtgaatagaattaaagaaaaaaacaaatccatgcagaattaaggaaaatatccataactcttgatttcttcaattgtaatatcctaagatgaaagagattctaagatagagaaaatattagctggagtatatctgcatcaagggctggtggctccaggctgctccagagtgtgaaagtgtggataactttaagttggcattaaagttgagaatatatacattttccccacatcatttgccagaggaaacattcaaggcaagtgccatcattttgttgcatgctgaacaaatcaaactaaacccaacccaaagaccccagcacttatgtaagaaaaggacttagcactaatcaaacagtaaccatgtgtcagattcccatcccaaaggtgtaacccgtgaacaatacctcacagaatagctgtcctttgcaaccttgatggtgaggatctgtgaggtgatgacagagagaacttctatatccatccggttgaattcatcaaaacagcaccaagctcctgactgcaccaacccgaagaataatttcaccactatctttaaaaaaaaaaaaaaaaaaaaaaaaaaaggattacagaaactgtaaggtgaacatttccctctggatactaaacggcgtgtattcttttcatcttacccaaatccaataaacatctttggcatttttctctccatagaaagtttagcagttgcttagaccacagaggagtttactgctgtttcttttgaaagcttaaatacaaacaacaaactcctgaattccaggaccattggcaggtgcagctgacagctaactgcacaaagccactgaggtctcagccgcctcctagtcattgcagcagatgggagtcaggtgtcagaaggcagatgcccttctctggagcaggcagactcctcagagttcggcttgggctccaggtgaggccaatgttgacagcaggggtggggtggaggtgatgaggggtgagggcttggggagcttgtaagcaggtgttattaaaacacagtggcaacctgctaaaaaccctattgctgtcagtgataaaattttaagctcttattgtaagttctcctgtgttcgttttcctgtagatatgatagaaaatgggacaatttgactctgttggattcttccttgctgtcccagctgtgccttgagtaaaaggactcacagttaatcccaacaccagctgcctagaggactagtactttgagaaaaccacaacaaccacaggagttgttcagaagtttgtgccaggattttttttttttttttttttttttaaccaccataggcctttgtgaactctaactgtaaccatttccactgaggtcagagggagtgcccgctcctaccccccatccaccccccaagccgagaactgctctgacactagaaaggccagtctgtgactggtccaagtacaaacctctaaagctgtgactgacactaaagggaaggcctagacactcctgtgctcagtgacaatctcctgtgctccctcctccagactgcaactttaggcccaataatagttagtttgctttctactgctgtgataaagaccatgaccaaaagcaacttggggaagaaagggttttttgaaggcttacagttgtaggccaccacgaagggaagtcagagcaggaacagaagccaaggaggagtgctggttactggcttgctccccatggccttgctcagctaccttttatattcgatccaggaccagccagcagagtggctccacccacagcaagctgggaccgcccacatcaatccttaatcaaggtaatgtcctgcagacttgcctgcaggccaatctgatgaaggcatcctctcaattggaattccttctttattgaccctggctgtgtctggttgacaaaaaactaagcagtacaaaggcctcctgcaaatggtcttttcttgcttgtttttttagcactgtgggctgagttggtaacaaggacagctaagtggtggtgagaatgggcggaaacagtggtaatggcgcagttggtaggcctagccaggtaagtggcaagttagcctgctcgttagttgctgaatgagctcaagagacaccaggggaggacaaacgacatgggggggggggagtggagactgaaggctaagaagctccagaaatccagaaagcaggcactgctggcctcaggcctcagttactggaagaattcataaaactagaactctttagggacaaggtcttaggccctgactataacactggttagtgctaagggttaaggaatcctgacatggtaggccaacataaggaccagaacaatggctggtaccccaataagggctgcttggaaattacaatggaagttgcacctaagaacagaggaatctcagctgcctgggcctacacaggagctttaagaccaacaggataaagcaccggataccagaggattgtgggaggatggtgacattggagggtgccacaggctgctgctcccccccctccaccaaacacaaaggaaaacaagagctggcaaaacaccatctcttgaaagtcttttcttgcctatccaaaatttctatccaggtggagcaagaggacccacaccaagctgactggaaccacggacgagtgacccaagccctgagccccagagagatcccagccagactcaagactgcccagcagaggcacacagctgaccgacagcctaatcagtagaggcacaccgatgatggcccacccttcttttgccagctgctacacgcccaagttagccaggccctacaacagccttctgtgaatgctaaaaatctgcactgaaatctgttgacctgaaaatactaccaactaaaagaaaacagcagtgccaagcaaaaccaaaaaccttcatgggctggagagaggttgagagatgcctggggtctcaagtgtagagagggggacagaaaacagggttcatgggtctggggtacatagaagcttctggatgaagccaaaaatcagaaaacctttgcgttaagtgtcaatattttgttcaccatgggatattttgggctctagccaacatgtaagacaagttgcagggttatacagcacttgctcaccgtgagggacctgagttcagtccccagcagtaggctacaaagcccccaaactgtagtgctgtgaaattttgagttcaatttatcacctgagattttaataaaaatattttaagattttattaggcatgtctcagattattatcatcattatttctataagtgtttttggggtccatcactgtagcctctttgagtttaataattacctttttagtaaataaatgttcagggtagggcacttctttgcgggatgggggttgtttgacacagggtttctctgagtagccctgactgtcctggaattcacactgcagaccaggctggcctcgaactcagagacccacctgcctctggcttctgagtgctgaggttaaaggtgtgcgccaccactgcccggcttgaacatttgtatatactcccatgtgctttgtgcatgtaagattttagttaaaaaagaatcccactgtcataaaaatcgagaattattgctttaaggaattcagttcaaccacttaaaagaaaaaataaaattaaaaaagttttaactttcaaatagggtctaggcttctactctgtattcattaaaagaactaatagtatttatactcttacatatatatatatatgtatatatatgtatgtatattttaaagattttatttattatgtatacaacattctgcttccatgtatatctgcacaccagaagagggcaccagatctcataacggatggttgtgagccaccatgtggttgctgggaattgaactcaggacctctggaagagcagccagtgctcttaacctctgagccatctctccagcccttaccaatatttttttttgtattttttcttagttttttattcatcaatgaaccatttcacatgcatatttttgagtatatagacttaagctttaccttataatccaaatcttcaaaacagttgaagaccacacaatgtttaccatagctctggaaaacaaaatactgttttaatatagttcttgagttatgccacaaaatcacaaaatacaggtgttttaaactgccagagtaagaaaatatttctaccaagtttttgaggaaaaaaatagttaaaaaatgagttagcagctgggctttggtggcgcacacctttaatcccagcactcaggaggcagaagcaggcggatctctgtgagttcgaggccagcctggtctccagagcgagtgccaggataggttccaaagctacacagagaaaccctgtctcgaaaaaaaaaaaaaaaaaaaaaaaaaaaaaaaaaaaaaaaaaaaagagttagcttctttggggttgtagattgtaggctggttattactttgctttaaatatgatattcacttatgagtgagtacatactatatttgtctttctgggttgcctctctcaggatggtttcttcctagttctttccatttgcttgcaaatttaaagatgtcactgtttcttactgctaactagtactccattgtgtaaatgtgccgtattttctttatccattcttcagctgaagggcaactaggttccttccaggttctggctattgcaaataaatgttgctatgaacttagttgagcaaatgtccttgtggtgtgaatgtgcctcctttgggtacatgcccaaaagtggtattgcagggtcttgaggtagattgatttctaactttctgagaaatcgccaaactgatttccatattggtgtagaagttggcattcccaccagcaacagaggagtgatccttttattccacaacctctctagcataagctgtcatcgctgtcagtgttttttattttagccattctccacaaccgcagagaagctagatccctcttgcagaaacacatggaagaagatgcagagatctataactaaccattgggtcacctctcagagtatgatcgcagtgagggaggagtgacgatatgaacaaaggagtcaagaccatgctgcagaaacccacagaaccagctgactagggctagtgagagatcacagactcagcactgtcaaccaggagctggcataggactgaactaggactcttgaatactcttgaatggtgtggcttgggcagtatatggagccactggcagagggaccaaggtctagctatgtgcataaattgactttgcagagcccattcactatggagagataccttgctcagcctagacatgggtggtgcaccttggccctgcctcagagaggtgatgggacagacttagttgacatcctaggggaggctttaccctctctgaggagtggatgggaggttcagtggtggggggagggggggaggagggaagagttggagaagaggaggggggtggaactgggattggaatgtaaaataaataaataaataaaatttaaacaatgagttagataccaagtttagagacccacagaactaacagggtatgcatgtgattagctgctataggagagccgatgaatttacagagctttaggtcatgatttacacaacaacaaaaccaagggggaaatagagcagagaaataaacggttccttccctcacctcctgcactgtcaatcagtcaattcatgcagtaagattccaggtacaggcaaagatggttggctttcataagacccttcacatggtagacactcaaagtttatttgatggagtgtaccgtaatgaatgtgttggtaaatacaatgaacattttaacagcagtaatagtgtaaagttaagatgtgattgaagtctgtgtgacagaaattctggatacaggagctacttacttttgctaggtctttaacagtttcagtttttcctacccctgctggcccagcacagcagcctcctaggttgaagtacagggctgacatgagagtcagccagcatctttctgtgaggggcgtgatgatcagccttggtgtgcagcccaggtactcgtagccataaacataattggtgtttccttgggatatgtaacacaacttttgcttttcgttccatttatattgcaaatgtctgaaagcaatactcatatattatttgggcaaaaacatttttgcacatagaaacataatcattttaaaacaatttaaatagacccacaaccccttgtgttaataagcagaaattaatactaagtctcagtgggagcggctgtcaggacacagaaaaactctgcctacaaaacacagatgcaaaaatcctcaatgagatatgtgcaaaccaaattgaacacatcaaaaagattttataccatgatcaaatttttttcattctagagtcatggggacagtacaacatgcctaaatcaataaacagagtccaccaaataaacagattaaaaagaagctcaggggtcggatagtggagaacacctttgatgccagagctttagaagcagaggtgggtgaatctgtgagttccaggacagccagagctacacagagaaaccctgtcttgaaaagtcaacgaaacaaacaaacaaacaaaaacagaaaaaaaacccaaaaccaatcaaacaaaaaacagataaaaagacaaaaaacacatgatcatctcattagatgcagaagattctttgtcaaaacctaacactcctttatgataaaagtcttagagacactaggaatgcaaagggtacacttaacatgataaggtcagtttatatcaagcccacagccaccatcttcttaaagggaggaaaactcaaagcatttgcactaaagtcaggaacaagacaaggctgtccactctctccatccacctactcaatatagtgcttgaagtcttagctagaacagtaagacaactgaaggtaatcaaaggacaacaaacaggaaaggaagaaggaaatccttatttgtagatgatgtgattgtatacataaaagaccttagatactccaccaggaaatgtctactgctgataaacactctcagcaaagtagcaggatagaaaattaacgcacaaaacccagtagtcttcatagacataaatggcagacagagaaagaaatcacggaaacagcacctttcacaatagcctcaaaaatatctttgataactctaaccaagcaagtgagagacttgaataagaaaaactttaagacactgaagaaagcaattgaaaaagatgtcagaaattagaaagatctcccatcagcaggactaatactgtaaaaaaccaaaaaccaaaagcaatcctcaaatactgctcaaattactctgcaaaatagaaacagaaggaacatttccaaaggcttttttttgaagctactgttaccctgattttaatttcataaactgctatgttgctgaaagtgacttagcggctgtagaagtttcctggtgacatctctagggccttctatgcacaaaatcataaaaagaaatacatagattcactgcaatcatcataaaaatttcaacataatccttcacagaaacagcaagcaagcaaacacacaaataagcaacaacaaaaacaaccttcacctggaaatccaaaatcccaggatagctcaagcaaccctgaaaaatgaaagaacttctatcaccagctctgatttcaagttgtactttggagctatagtaataagaacaggatgatattggcatagaaacagacacactgatcaattgaatagaattgaagacacaaagcaagtctacatacccatgaacacttggtttttgacaaagaagctcaaattacacactagagaaaagatagcattttcaacaaacggtgctggtcaaactggatgactgcatggagaattaaaatagactcatctctatcaccctgcacaaaattcagtttcaaatggatcaagtccctgagtctgatagaactgacagtaaggcattcatttgaactcattggcatagaaagggactttctgaacaggacgccaagagcacaggcattaaagccaaaggttactaaataagacctcatgaagctaaagggcttctatatagaaaaggacaccattatttgaaaaagtggcagcctatagaatgggaaaaaacctttaccaattatacatgacagagagttagtatctagaataggctaagaactaaaacaaaaatgaacttaagaaaaataactcatttaaaaatgggatatagagccgggtgttggtggtgcacgcctttaatcccagcactcgggaggcagaggcaggcagatctctgtgagttcgaggccagcctggtctccagagcgagtgccaggataggctccaaagctacacagagaaaccctgtctcaaaaaacaaacaaacaaacaaaagggttatagaactaaacagctagttctcaaaagatgatacacaaatggctgagaaatgagtttttaatgtgttcaaaatccgttggcatcaaagaactacaagttaaaactactttgagatttcatcttacccctgagagaatggacaagattaatacaacaaatgacagcagctgctcgtgaggctgtggcgggggtgggggtgggggggggtgaggggaccacgacacttgcttactgctggtgggagtgcaaactgggaaaggtcaatacagaaatcagtgtggagtctcctccaaagctgcaaatccatcaactacaagatccagctacactacacttgagtatgttccccagagggttccatatcttcctacagagatgcttgctcctcaatgtcctcatcagaaaagtctcttctttgagtagatggtaatgacacagagacctaaaattggacaaagtatatgagagagagagagagagagagagagagagagagagagagagagagagagagacagactttggagcactcagccctacattcgacgtctttatcgaaactctcacttcaaggcttgggatctgggtagaagaggtagacagacggtaggaaccagaggtgatgggtgattcccaggaaactgtcttccagacaccacagggtttatatacacatgaacgcacagagaccgtgacagcaggcacagacctgcactggtcaaagtccagacacaatcccagcaccgagaagaggaagtggacacaaaggcccacccctaagcaagacattatttgtgattgatgcctctaagaaagggaaaaatcagttttctccaatgagtgatatgggtatatggaccacattccagggcacatgagtaattgctcaacacaaaacaaaatccgtatttttgtgagctttttgttgtgttaattttttgtcttactggaaaattttggtttctctgttttgatttttactttttgggagacagataaagaacttgacgttagtgggtaaggaagtggaaggatctgggggaagggacaggatatgattaaaatatattgtataaaaataaaaaagcaagcaaacaaatcaaagtactaaaatctgtgggaaaataacatttacttatgactgtattagtagaaaccacgaggtacaaatttatagtaatctagtagtctttacacatcttaaacagtttagggctgtgttgcttttgaatacaagtggaagctgacagtaaatggccgcccagtttcccgctgagtgcccttctctcattagactataattaatactgtgatgtagttgtttgtctatcattcacacctctcaaccccttctggaacaacagagcagattataaagaaattaaccgagtcaatcttcaaaataaaattaagataaaagcaatttagaactatctgtatgctaccacctggccaactctcagatgagagaacacataactaggtaaaaccagaaagccttttcatttagtgtatgggacccatgctcaaacttgcctcagcagaagtagcttctctttctctgtgccttcactaactgactccaagcaggaggaaaagttgctgagttggattattgactagaaacattcttctgtttctttaaccttgtctgttccacactgagagcatgggaggaaacgaggcaccatgcataccacccatcactactgctgaaacctgttcctaggcttagtgacaacagacaaaacacacacaccaaactgaagagcaccattggctcagaagataaggcagaggggcaagtgaggggagggaagaggaccaagggagcaggggtaggaccacaatgcttagaggagcagcccatccttcaagtgcaaaccgagatggacaaagcctgaagcaaagaagctaacggtccatatgtgagaagttgttctatgtagttcttggttggttttttttttttttttttgccacttacctcgtccactcaaagtcctctgcactgcagatgttcttggctagcaggtctgtcacaatgtccctgcagtgagcagtgatggtcagcattgctgctagcatgacttttgtgcgaaacttgccagcgtttagtgtgaccagcacaaccaagtcttccatatgacatagtacattggcatggactgcttctagacttttccttacattagaactcataaaacctttcatacaatcattatagaacatgatctgtctctgaaaaaaaagagagatggaaacacatattaatagaagcatacgatcttgtttttcattaaaatatttccatgaattaaatgctacggatctataggggcgatttgtgtgtaaaagaaagcacacgtaggtttgaaagctgaattttgattgatgcttatgacttctttatgttttctaaatcttatgttttaaaattctgttgtttttgttggtgtcacatatgtacattgtgggtcatacacgcttcatcttcctttcctgagcccttctctgtcctccagagccccatcctactttcaggtttgtgtgcctgtgtgcccactggatttgccaagggctgctttcgtggagaattggtggagtgttcagccctaagtggtcatttatatcaccccctccaaagctcagggaccgtcaaggaaggaggagggcagataacgcaagagccagaggatgggcaggtgtgctgtaaccaagaagtcttctgaccatgacatgtcctgtgtacccatgaactcactgcattactgagtaagacccccaagagactgggctcatagacatttcatcctggaaggaggaaaggcacacgaggcctgtccctccctgagggcctcctgccggttatgggtgactgcaggaaagggtgttgctttctttggcagtgttatctagcctgttgtccatgctccagggaataaatcttgccttcttaaaacatgatcattcaataataacccgagcacaataacaatggtggagaaccccaagattaggttagtgttgtctcctcggctctcctagcacaaagtgcatatatctgtggttttaaaagtcatgcggcttcttttatctgattcactggcacattcattcattctccccagacatataagagctgtgcgaagagaatgccttaaaaccaggcagaccgtgcaggttaaagaacgcaagccatcaggaaagctcccgagtctggaaaatgaggtcaattgggacttctagacagggtctttaggaagaggatcatgattggataagggggcagcatgaactcactttgaactatgctgaatttttaaaaagattttatttatttattatgtatacaacattctgtctccatgtatgcctgcgcaccagaagagggcaccagatctcattacggatggttgtgaaccaccatgtggttgctgggaattgaactcaggtcctctcgaagagcagccagtgctcttaacctctgagccatctctccagcttgaactatgctgaatttaaagtgcttaaaaacatataagtagagctatacagttctatcgctgggaatagttagcataattattagcataataattagcataattagcataataattagcataattatatattatatataataattgtggtgatatatttccagagaaaggttaagagggttagatggtagaaacctagtgcattaattggcattcctttttgcacgcaacagaaactaactttaaaagattatttcttaattttgtgagtttataatataattacatctatgggaaaatatgtttttgtcacatacggcttgtccttgtggttgtatacagcttgaactcctgagaactttactcatgtgacctttcctaatcctcagaatataaattgtctggggctctaaataaagttggtcattgcatgagattttagtctgcctcatttgtgggcttcatactccaaggtcccatcacctctaccatggtgacacacttatttctagaggaatcactaagtgctatagcatgggcaaatctatatagaaaatcttagtggccaatatacagagccatctcgtcccattctctcaaaaatgtctttttatgcttaatcagagacatctctctgtggagagttccagagagctgtaaattcaagggagccgtaaattaggccctagggtgggaaataaacaatgggtaaggtagatgggggagtcgctgggccaaagcacactcagggacagagatagagcccactctagagtgattccaagagcccagtgcagtgtgctcaagcatacttgggccaccagggacccagggaagagctcctcttagggaaaattgggctatttgaatttgccaaactacagaaatgtatagatccccttgtaattctgtcaccgtcacccaaacagcttataccagcctttcagcttaagacccggcatttacttgagcaagtggagagcaaatgtgtgtttttatggtcccaggtgaccttagtgaagatttgaaaattgtggtgggtcaggcgaagttttaaaaaaaaaggggggttatttttaaatgagagaactgtaagtcaagtatgctttctgagatacttaatggttactatggtcatggctttctgctttcccctctccagataaaccagtctccaaggttcacattgaccttaatgactgacaagttacacagtttcagattgcattagtgacactgctcattgttgttgcaggatatttgatcacactgtgaacccgagattgtgttatttacagaaaaaaacctgtctctagctaaggtggggctcagccctcgcacacacctttctccaagagctttctgccggaatattgcaaacaggattaaataaagtcaaccagaggtctagaggcagagcaagcagccagttgccacatggtggctcacaaccgtctgcaatgagatctggtgccctcttctggcctgcagggatacgtgcagacagaacactttacataataaataatcttaaaaaaagaaaaagaaaaagaaaaagaaaacacagagagtaagagggagtcaggaggatagagaaagacacacagtgatgtgggggggcatggagtgagggagctcaactgaaatcgtgggagagaggagacgtccagtatggtggcggaggcggaagggcagctgggtgctttctctgcctttctgagttagcaggttttcaccccagcatctggcttctgagtttttattggtaaaatcaaaggattgagatttttgttaacacacacacacacacacacacacacacacacacacacacacacacagtcatgacaaaatacccgacaagaagcaacttaataggaaaggattgatcttgtttcctggtttgagggcacagtccatcatgtcaggaaaaggcatagtacaggaggggtagcagttctcagctgtgggaccagaaacaagaggctgcttgctctctctcatacagatagagaaagaacaaggcgctcaccagggctataaaactttgaggtctgcctcccatccctgacccctagtgaccagctccctcgaggcaggcatctagcacctctagctgggaccacaagtgtgggagacttttcacatacaaaccgggacacagatctctgaaggccttatgaattaggactgcccccttttcttatgacccttcagttttttttagtgaaagatcaaagaaacaaacaaaaagtcatcctctcaactccacggttacttccctaccccctcttctgccccaccccactcttttgcagtactggacatgggctagtctttcatcaattccttaaatgttatccgcctttggggctcctctgtcttctcttattttgtaattctgctgagggggatttcacacttttctaattttctttcctttcctcttttaacaagtgtgtgtgtgtgtgtgtgtgtgtgtgtgtgtgtgtgtgtgtctacatatatgtcatatatgtatgtgcaggcatcatggggttagaagaggtgtctgatcccctggaactgcagttatagaaggctgccagctgccacatggtgcctgggaaccaaagcaggtcctctgcaagggcagccagtgctcttaactgctgagtcactgagccaaccgccacagcattactcttttaagctcaagagaagcaatacaatgaacaccaacaaatttgcagaatgctattaacaccaacaaatttgcagaatatggccttctaccaagatgttcatgtcctaatccctagaacctgtgatgatcccaagagacacagcagatgtgcccgagaatgttgagatgggggaagattactctgggttatctgtgttgcatgcatccttacaaccagagacttcttcccatctctgagcaggaggtgtggctacagaaggatggctgggatcatgagaagcgatgcaaccagctctgaaggaggaggaagaggccataaactgaggtgtcctggccaccttctctctaggacctgggggaggccagggattggagccccttccccctagagcctccactcacatctgccaacaacgtgacctcagcagggagccctgcactgttcttttcacccacaggcctttacgacgaccaatttagaagttttaagccaagtttagagtaacttttaatggtaatggtaaaaaatgtgttgagtgcaattagtgacacttttaggaaaatagtttatgggtgactcttatttcatattataaactgaatattttaaactctaagagggtgaaggaattctagaatgaataactgttcattcattatagaatgaatttatcagccgccagctttctgtaataattttgctatttatcatgtcatttatgtacctacaaatgcatttcatcttatttttaagtacatttcaaactaaccaggatgtatcggtacctttcataatagctcattgtcatatttttactttctcagaactgcatccacacactcatccctctcatgacgccagggggcatccactcaccacagtgaggacaacttgtcctggatgtgatagtacccaatcggaaaaagtctggaagtcccagtcttcaataccttggatcagaaatctataaacccaaaagatacatttatgttatccattcatgctcattgatgatgctacttaatgatgaagcattaaccctgctgccattttaatctgaacaggcacccatgagtgatgtagtctttagggttccctttaccggtcagtgtctggattggtagaaatatatattggcttaacagaagagtatatcagtcttgaattataatgttatcaggggtaaaaagctaaaaaggctgtgttcaaaaatagtttttactggccagcctgacccctaccaaagtgagtgtaccctctgctcctgccctactcctgcccaaagtccattcaccccggatctctctgggcctgggcctgcttagagtggaaccgcccaggcagggaggaggagctccctgagtctggaaacacctcactcttccttccccctgtgcccggtctgacccctaccgaggccagatacctacttagtgaggcgactaccaggagaggcaagaccatccagagctgcagacattgaagtcttggcccccacacaccaacgggtgacaagaggagatagagagacccagacctgcacccactggaagaagagatgggaagacaacagtataagaacacactcaacaacagaaagaccaatatgacgccaccagaatctagggactccacaccagcaagatctgaaaatctcaacacagaggatgaagaagagatggacctcaaaaattatcttaggaagatgatagagacctttaaagaggaaacaagaaaatcccttaaagaaatagaagaaaaaacaagcaaaaaattacatgaaatggaggaaaagaccaaccaaaaaattcaagaagtaaacaaatctcttaaagaatctaaagaaagccaagaaaaaacaaccaaacaagtgacggaagcactcaaaacagttcaagacatgaaagctgaaatagacacaataaagaaaagacagaacgtggggatgctggaaatagaaaggctggataaacgatcaggaactaaagatgagagtataaccaacagaattcaagagatggaagagaaaatcttctcagttgtggaagactcgctagaggatatacagtcatcgaccaaagaaaatcacaagtccaacaaatccctaacacaaaatatccaggaaatatagtcatcgtgaaaagaccgaacctaagaataataggtatagaagaagatgaagatatacagctcaaaggtacagaaaacatattcaacaaaatcatagaagtaaacttccccaacctactgaaggatatgcctatgaaagaacaagaagcttacagaacaccaaacagacaggaccacaaaaagaattcccctcaacacataataatcaaaacatcaaacctacagaatgaagagaaaatattaagagcatcaaaggaaaaaggccaagtaacatataaagggagacctatcagaatcacacctgacttctcaatggaaactttgaaagccagaaggtccctcatgaacatcgatgcaaaaatattcaacaaaatactggcgaattgaatccaagaacacatcagaaaaatcatccactatgatcaaataggcttcatccagggatgtaaggatggttcaacatacaaaaatccatcaatgtaatccaccatataaacaaactctagatgttgaaaaaacctttgacaacatctcttcatgataaagatcttggagagaacaggaataacaggaacatatctaaacataataaaagcaatatacaccaaaccaacagccaacatcaaactaaatggagagaaactcaaagcgattcctccaaaatcaggaacaagacaaggctgaacactctctccatatctcttctatgttgtacttgaagttctagctaaagcaataagacaagaaaaggagatcaaagggatacaaattggaaaggaagaagtcaaactttcactatttgcagatgatatgatagtctacataagtgacctgaaaaactctaccagggaactcctagacctgataaacaccttcagcaaagtagcaggatacaaaattaactcaaaaaatcagtagcccaactatatacagatgataaatgcaatgagaaagaaatcagagaaacatcacccttcacaatatccacaagcagcataaaatatcttggggtaaaactaaccaaaaaagtgaaagatagtaagaactgtacagtaagaactttgagtctttaaagatgataccagaaaatggaaagatctcccatgctcttggataggtagaatcaacataataaaaatggcaatcttgccaaaagtaatctacagattcaacgcaatccccatcaaaatcccaacacaattcttgagtgatcttgaaagaacaattctcaactttatatggagaaacaaaagacccaggatagccaaaacaaccctgtataatagaggatcttctggaggcatcaccatccctgacttcaagctctattacagagctatagtcctgaaaccagcttggtgttggcacaaaaatagacagatagaccaatagaatagagttgaaaaccatgatattaactcacacacctacaaacacctgatttttgacaaacaatccaaatatatacgctgggacaaagagaacatcttcaacaaatggtgttggcataactggatgcggacatgtagaagactacagatagacccaagcctatcgccctgcacaaaacttaagtcaaaatggatcaaagatctcaacataaatccagccacactgaatcttctagaaaagaaagtgagggatacccttgaacgaattggcataggagactgcttcctgaacattacaccagtagcacagacattgagatctacaaataataaatgggacctcctgaaactgagaagcttctgtaaggcaaaggacacagtcagtaaggcaaaacagcccacagactgggaaaagatcttcaccaaccccacatctgacagagggctgatttccaaaatatacaatgaactcaagaagctagccaccaaaaccaccaaacaataaaattaaaaagaggggtgtgccaggcgttggtggtgcacgcctttaatcccagccctcgggaggcagaggcaggcggatctctgtgagttcgagaccagcctggtctacaagagctagttccaggacagcctccaaagccacagagaaaccctgtcttgaaaaaaaaagtggggtgcagaagtaaatagagaattctcaacagaggaatctgaattggctgaaagacatttaagaaagtgctcaaaatccttggccatcagagaaatgcaactcaaaacaactctgagataccctcttacactggccagaatggctaaaatcaaaaaacaccaatgacaatctatgctggagaggatgtggagaaaaaggaacactcctccattgctggtgggagtgcaaacttgtaagaccactttggaaatcagtatggcagttgctaagaaaaatgggaatcagtctacctcaagatccagcaattcctctcttgggcatataccccaataatgcacgtccatacaacaaggacatctgttcaaccatgttcatagcagcattgtttgtaatggccagaacctggaagcaacctagatgcccctcagctgaagaatggatagagaaaatgtggtacatttatacaatggagtactactcagcagaaaaaagcaatgacatcttgaaattcataggcaaatggatggaactagaagaaaccatcctgagtgaggtaacacagtcacaaaaagacaagcatggtatgtactcacatatgaattttagacatagagcaaaggattaccagcctacaatcctcttcaccaaagaaactaggaaacaagaaggactctaagggaaaaatgcatggaccccagagaatgggaaggggcaggaactcctgagcctattgggagcatgagggtaggggagagggagattccagaatgggaggagaagaagaggaggggacaggaggaaatggagtagcagaaatgttgagttgggggaagaatagaggcgagcaggatgagagataccatattagagggagccattataggtctgaggagagatctggtactagggagatttccagagacctacaaggatgacacgaactgacaatctaggcaatggtggagaggataccctaaatgcccttcccctataatgagactgatgactactttttatgccatcctagagccctcatccaacggctgatgggatcagaggcagacacccacagatatacactgaactgaactgaactctggaacctgttacagagagggaggaatgaagatcgaaggggttgttaccaggttgctgaaacccacagaaagagttggcctgtacaagggggagcacatggaccccagactgctgtctgggaggccagtacagaactgatcctgacccctgaacatggatgtcaatgaggaggcctccacactctagggggaccctggtagtggatcagtatttttcccaggtgcaagaaaggactttgagagcccatcccacgtgaagggatgctctctcggcctggacacatgggggaggggcctaggcccggcccaggatgatgtggtggactttggggagccccgtcgagggtcctaccctgcctggggagtggagggtggatggagtggggggcacttcgggggttggggatgggttggaggaggggaggggaagggggagggagaagggattgacatataagcaggctggttcctaatttgaactaataaaaaatagaaatgaagaaaaaaaaatagtttttactgggggcattacatctttctggtttctaccctgtcaatatcatctgggatggaaacagaggcaagggaaagacaacacattctccaaagattagtaaatagcaagagttaaggcagcgcttccatacagagagaggaagaacatgcagctgggagccaggtggggaagagctgggaggggaaggaataggattcaaatatattgcatgaaaaaggtttttaacaacaatttgaaaacgtaacacaactgctctagtcaaactatttttagaagcctatactctggggtactttcttccctgaacgtagatggcaatcacagagtaataaacaaaagagaatattgaagacaccaagcaaaggctgtccctcagcaatgctcgcctagtgcacaaggttccgtgtcgggtctccagcactgctcacctccaggtctaaacctactcaacagtgtgagggagtaaaagtgcaacagagacacaaagtagtgagcccgacgcttttgaaagcagactggaactggcttgagtcatgtcttggctgatatttgatgcccaagcacacacagacacacacacacacacagacacacacacacacacacacacacagacacacacacacacacacacacacacacacacacacacacacacacacacacacacacagacacacacacacacacagacacacacacacacacacagacacacacacacacagagacacacacacacacacagagacacacacacacacacagagacacacacacacacacacacacacacacacacacacaacggcccacataacacatacaaatacaacactcaaacaacacacacaatgcatacacagcacacaatgtatacacagcatacacatacaatgcacacacagcacacacacacagtgcacacacacagcacacacacctacgatgcacacacacagtgcacacacgatgtacacgcagcacacacgtgatgcacatgcagcacacacacacggtgcacacgcagcacacacacggtacacacgcagcacacacacacagtgcacacgcagcacacacacggtgcacacgcagcacacacacacggtgcacacgcagcacacacacagtgcacgcacacacacacacacacagtacacgcagcagcacacacacacgcagcacacacacacggtgcacacgcagcacacacacacacacagcacacacacacagtgcacacgcagcacacacacggtgcacacgcagcacacacacggtgcacacgcagcacacacacacggtgcacacgcacacacacagtgcacagtgcacacgcagcacacacacacacaggtgcacacgcagcacacacacggtgcacacgcagcacacacacacggtgcacacgcagcacacacacacggtgcacacgcagcacacacacggtgcacacgcagcacacacacacggtgcacacgcagcacacacacacggtgcacacgcagcacacacacacggtgcacacgcagcacacacacggtgcacacgcagcacacacacacagtgcacacgcagcacgcacacagtacacatgcagcacgcacagtatgtataatttcagggtttaaatcctgtactcactttttcagcacatcgaacatgcttttctccacattcaccatccactgctccacagcagttcttactcggattttcctataatttgttaaaaaatattatcaaaattactataatactttctttctttgaaaaacttgtaagttaagttcttgacacacacattacttttggggcaaagaactgtaagactgtacattctagtttttaccaatttttttttacttggaaaaccatgcagtaaaacacatttctttagggaattctgatatcaaaagtaggaatataattagatttcagataacatagaatgtgtgagagataaattgtattataagatactcagcagttaagagcactggcatcacacagatacacatgcaggcatgtaaattaaaaaaaaaaaagtaaaggtatttttggaattttccaatacctaaattgggctgggggctttgttgggtaggagagcttgggcatggcattgcttttcctcagaaaccagctgctgggggctggaggaccctctgaggctggcaaacgggattagtgaggcagaaggccttggcttgcggcgcttgcctgggaacccaccacggtgaaaccggggtcagaacaatgcccacagatcccacagagcacattccgggtctatctgaaaagtcagattcccgtggggcaaaagctagtgtgaattagtgcccagggttgggcagttctttgttccaactttacgttaaagtgaaagtgagcagagagcccgctgtggtgaggtgggggagcctgtgttcacacgaggacaccatctggaagaaacagtggctctaagagcctaagtgtggggtcgccgtgctcctcatacttgggcagcaccaggccctctccttccgccgagatgagcatcttcacagacggagggccaacttcgtgtttccatagcagcacgtgcttcacgttttcaaagcatttcgaaagatgaggctgcaaaccagaacacgcccatcagtcacacagtaaagccccgacagagagaggacatgataccgagaggggacaatgctgtttacctgcacggaattggggtttgtgctgttagctagaatatgaagaagttcagcgttgctgagaaagtagaatcttgggaaaatcattcttttagcgtcaaggtaatcctgtccaaagccaaaagaaatgctgctgagggcacgtgtccgaccgccctggggatcataccttcacctggcctgcagtattaaaggtgcggtgcacactagatccagccagatggtagctcaagctccatgaaagctgaagcacttcttagtaaggcaacactaaaggaaagggaaatgaaagcagaagcaagccaacagcagagctctgccctgccacacggcgcctctaccgtcaccaccatgtgacggctgagcacaagtatcgccagcacgcctccctcctctcccaagcttgcagctttctggcctgtttgtcatccccacagagggcacatcatttctacaaatgatctcaggctctactccacccagtcccccacgcttctcaacccatgctacagctcattcatctttccagtcttatcttttgtcacagggtgggtgtggcctacggcgtcatttccctcgttcctcccccatgtcttcagtctctacctcgtagaaggcctctgctgccaatgaattttctctcattacaaagacacagggaatcctctcccccctctgctctctctctgcccatgcacttgccttctctgaattcctgagaagacagtttattgactcaggttttctactcgtctctcagtatcctcacatgctgcaattgccccttccaaacattttgggaacatgtcagtctttatgttacgcggcattttccaaagccccgttcttacctgtatcatctcacatttgttccattgcttagcaaccctgtatttccctttgtgtccgccccccagccccatccactcttatcaacacctcttaaggatcagctcatcacgcctcttctttacccatgatgcttcctggcggtttcatacgtaaccactcaccctttagctgggaccacaatgctctatcaggaccccaatacagaagccagccactcttatgcatagaaagagacctttctggaagcctggaatcttggcgacaacattgagaaactatggcagtagatctagtaagtgagggagcagtgagttgttcggtatgcgggaggcaggccctctggacaaaggggtgactgacggcctgaacaggatggagacgttatcactgtgcagactggttcatgatcagagactcatcaatcatttctagggcttcctagttaagatcttcaaatcacagctggctacaagtaatggaaaccaggagaaggaaaatcatgggccagggattgtacccacagttgacaatgtccacttaagtgtcttacgggtgggtgagcattgagcctgagcacgatgtccttctatggggacgcctctagttcccagctctgttttgtgatttccggccagctcacaaatgtcaatcatcctgccccagcttctgcagtacttaccaccttaataaaggcaggactaatacagtcgttagccttcattaagtgttaagtaagagctctctccaggccagttcaggtgcttcaaatgcacgaagcttgtgggagggctactgctcttcttggcttaaaaaaaaaatgttgctgtatggaaaagcgtggtgcttctctcgaggctcatttgactggtccacccatctttttctcttttgctagtactttcattaaaacaaaaatggcagtgagagttagaaaagctgctggcagggacacagagaggaaagtctgccctgatgcaccacggtaccgcggcacttggggtctgctgtagcttgcttacctccagacttttctttatgttttcaaggtgtccattgcagattttcagaacgtcgatgatccttgtagtgacagttatgtgcaaagcgttgagtttgttcagcactctccccgttatttctctccacatgataagcacctgggagaaaagtcttgtttctgtaggcagctgtctttaaagataaaaataaatgtgaataattctgagagtgcttcagtgaaagcctaccctattgttgaatttatcagataattttgctgaatttataagacaaatttacttgattagccattgtatctatttttataagcagtatgtatttcaagaaaaacagggtgaaatacaattatcatttatcaagattttgcttaatgtatagcagacaacagatacacagaaattctatataaagataagtaaaagctgtctgtgtctccagtctgcaacttgaatgtgtccccaaagccagcgtgcccccagcccctgacactgggaagtagtaaaacatgtaggagatgggccctcatagaatgaacttaggtctctgttcccagttctagcaccatgagggacaaggctcctgccatttgctcctgctgtgatgggtggctgcccctccgcgtgtctacagcagccatgtagactgtaaattcttcctggatacctcctttgtctccatttgaacactctcaagattaagcacttttaagaagctagaagtcaattagttggagcgctgtggatgaaggaagagaatgggacccttatcgcatgccaagtcccgctactccagctggtgcagagtgggaatttctcatttatgtatgaacgccatggagaagcatatttcttactaacgtcagaaccgcactaatcgcccagaactaaagagacacataacatgtgtctgtaatgttccgatcgatgcagctcagtttttataactttattttagcaatcaagggaactatgttttcaaaaggaagatgacccttgtagtagtctatgggtaagaaagtaacaatggtctaacagttcatccctgtatgtgtccgtcatcacttggccagaagcaattcagggaggaagggttattttggtctaccacgaggggaaggtatggtagctggagcaggaggccagctgctcacgtgggatccgcagacaggaagtgccgcaggctgtgaacactcaatgttcacagtcaactacccatttcctcctaaaggttcctcagtcttcccacaaataactggatgtgattgtatccaatcacatgacttttcacactcaaaccacagttggtgttcattcatcagagagatcatttccggaaggttaaatccccctgtgtatttcttccttccttccttccttccttccttccttcctttctttctttcacctgcacatgactttttttaaaatttattttcttacttttgcatttctgaagaattaaagattggctcaagataaagccagtctctctgacatttcatccattcctcaatggttaaagagaagaggttcaagttctgatgccattcagtcacaagatcctacaagaggaaaaaaacctgaatataacaatctaaatgcatgaaattactaagaatcacataatagaaactgaagtgaggcaatcagtggtcactgacataacacaaccataaacgcaaataaacctggctctattcagtctttagttttcagatgtcttgctcatctaattttctcatacattatatgagaaacaaatctttttgttaagacttgcacacatacataaaattaactcatgtaacatgcagactatatgtacacatatctctatctatctatctatctatctatctatctatctatctattcttctgatttggttaagttttttgggcaggatggtaacaagtccttcaaattcatcttatttagaagtagttcttcctggatgtgtgagttctttagtcttttcaaatatgcccagtttacaacttcctaatgaatttttattttagtaaaggcattttgtgcattttcacaactgtaaccaggttggacatatgatctgttcttgctgctcatttccaaagttaaaatcttaaaattatttgtatctcatttttttgtgaatcttatttttttctgttattctcttaatcacaatttttgtgttactataatccatttgctttcttctcttcctcccatacattgtttttttctctaaggcccatctaaacgacatgttcccttaagtgttcgcatatttacaaatatgaattccatttgcacagacctttctatgactctctctaatctgtacagagggacacatccatataacaattatattaattttgttatggaagagcctatcagtacacacctgattaagtttcttaaagcttgaaaattaattttagttaagttattggatgcagggctgccagttatgagttatgagaaactggtaaaagtcatattttgtggatatatatatatatatatatatatatatatatatatatataaatttatcttgcccatccaaattaaactttgatatttcctcatggataactaatgattacttgtataaaaattatttttagtgttcacattattaaatattccatcttctatataaacatgaaaagctcaaataattgaaatcaaatatgagtttgcagaaagcacagtgaacctggtaggctgcagaaaatgaaaacattcccaaatcatctccacagcgtctacctcaattggcgtcatataggaagacgctttgattgtggcgaggatggcctgggagtcctccagctgggctatggtgtcatcgatggatgagatgataaggatggagtaaccctctgtgtggtgaagcaccaaatgcagaggagatgtgttccagagctcgatgatcttaaacatcattttctcaagagcagcctcatttatggctgcgatcgatatttcacttattttctttccatatggaagcagctgaaatgaagaagtcatttaatatccagaggagccaacaattcccaaagcatctaacatgggagacttaaacccatttcttgagaggtgtgcagagccacagctctgacgctggtgaggtagaccacggggcctgagttatgacagagctctgttgagtcacttgggccacatgcttcatgctcaactgcaatgtcttcttcatctcatcgctggcagggacaagggcctgcgttctcctcatgtatgtgcggccagtgccatctcttccaactccattccctccacaccaatgcctatggccttgctactttccaacaagcttttacttcctacatttcttagagcatcacccaagagaaagcaacccaatgaacccagatttctatagcttctttttctttgctacattaaccaaagactaagggtgttttggttggtttttgttttgttttgtttttatgcattggtaagatatacaagctttcttccacatgcattgactgcaggttcccataagatcctggtagaaaatctttagattcactcccattctagagactcagagaacttctcagttccacctttcaaatgaactacctgggattactgtttctatcccttattacaaaactgaatctaccactactcttacacatataatctccacggggctaaagaatgaggcttaatagagggaggagtgatgagcaaaggggtcaagaccaggctggtgaaacccacagaaacagttgacctgaacaagggggagctcatggacccgggactgatagctgggaaaccaacataggatagaactagggtccctgaacgtgggtgtcagttagaagacctgggtctatggtgcctctggtaatggatcagtatttatcactagtgtctgaatggacattgggaacccattccatatagagggatattctcttagcctagacacatgggggagggtctaggccctgctccaaatgatgtgacagactttgaagatcccccatggaaggcctcaccctttctatggagaggaaagggatgggatgggggtcggtgggaggcatgggaggaggggagggagagggaactgggattgatatataaaataagattgtttctaatttaaataaaaatgataaaaaaagaatgaggcttaatctctgtttgctaatgcagcacagcaggtgctatgaaccaagagaagatgaacttgcaccatttgttatgtgtttccaaagatgacacagagggctcgggttgacagggagtgtttgtggccttaaacagcagcagtgtgaaagaggcttgctctttaacatctgaagggagagaccctggttacctgtactgctgaccatgcccatttgggcgtggttacaggtacgtagagggtaggacaagagagaggatgggaggtggctctctctctctctctctctctctctctctctctctctctctctctctctctctctctctctctctctctctctctcagagttcagctagctcctggaagcatctgggactggacttctctgagtgccaaatctggttactgattccttgtatgagtatatattccccaaaaattaccagttaataacctatctcgggttcgattttgttcctcatcaaacatctatcattcaggcaacatagattttaaagccccagaactagctaaaagttttatgctacagaaaaacttttcctccaactatactttgagatggctaaaaataaaatgtagatacaatgtgtaagacaaagtctgagccacctgaatctagtcctgttgagtctttatgatcaaagcttgataggcaaagaggtgggttttcaaatgctgtgatactgggacagttttagaaggatgctactgcctttaatgaattatcatctcctgtaaccttcgagcataaagtctctacatttacatcatatagatcttattcgctttgctattttttgagaaatgattttgcatagaccaggctggcctcaggtagggtttacatttaagaatggcctcaaacttctgatcctcagtctgcctctacctcctgagggctgagattacaggcacacaccatattccaggttggtttacatggtcttaggaatagaacccagagttcctaaatgctaggcaggctctctacaaaccaagacatatctagagccctatataatagagctttgtgggaaatcaaactgttgctaatttggcttttaaaacaaaatattgttatttgtaagactgtcccaatacgttcttaatatattttcactatgtataagatgagccacagtgcatttgacatttctagacctataaaatgtaatctgtgtaagaattggcatgataaagaatgacgtttgtcacatacaaaagccagggttactgttctctagtcgcctcagtaataaagctaaaacgaagccccctccccccaaatataacagtctgtcagggactcctggctatcccagacactccgcccacctccctgttttctaatgtatgttccttgtaggcttccttgcctgtaattaaaactaacccctcatgattcagcatgttcttgtcaactatttttacttaccttgagagctagcagtttgtctactgagaggtttttatcaagagaaatcgactttccggtaagctcccgaagagcctcccagtgccgtggcttgagacaagagtttcccagtgctgtgatgataggaagttcctgcttgaagtccatcactgactgcttgaggtgtgctaccatatcatttttaggcaaacctataaataccaggaatttggtagactaatgatatgttcatatctttttaaccaaatgaactgagaagatgagaatttttccttaaaatttgctaatcaatataatgccgttttatcacttgttaatcttcattatagaacaatgaagccttactgatgccaaacagttataacatcaattaaggattgaaatataagaaaataattatccagataaatggctaaacaccaagtggaacagacccaagttgtcttgggaaatgtagtgcttggaaggcacctagcaccaggtttcccagacttctttccctcacaggaatatacatcacacacacacacacacacacacacacacacacacacacacacacacacacacgtggatttttgtttgtttgtttgtttgcttgttgagatgtttttctggaacaggatcttatcatgtaatttaggttggtcttgaatttatgaacctcctgcctcagtctcctaagtgctgggattgcaggcactccactgtgtggaggctccacgctccacacagccccattgtgacagtgacatttattgtgtaatacagtgtacacttgttcctttgcttctgtgctgttggggattgaaacacaggcctttgtcctctaaagcgcatgctccatagtggagctacagccctaggttgtacaatttaacagcaagcaagctaaaatgtttcgatggcccttctagagaatggtttctagcttgaggtgtagtgagtgacaagggagacttaacaaaaagcaaagacaatcttgtccacgttaaacacagagaatgctgtcacagggcagcgtgtctgtgtaggcaccacctcaaaagtgatggttatcacaggccaatgtcacagaatgacttgaggtgtttttcccactgcccaaaggatgttataagcatcagatatagaattcaggaaacaattctgcaggcaggatcttagcatcaagatatctcaagctcacaaaccctgggagtcaaaactgattctgaaatatctggacatctacccatgaagccaactttgcctgcgtgcatgtgcgtgcgtgcgtgcgtgcgtgcgtgcgtgcgtgcgtgcgtgcgtgtgtttgagacaatgtttctctgtgtaacagtcttggctgtcctggcatctgctctggagaccaggctggcctcaaactcacatagatccacctgcctctgcctcctgagtgctgggaccaaaggtgtgcattatcaccacccagctcatgaaaccaacctttaaaagataccaaactattcataattacttgtggttatccatccctccggagacccaaggctttaaactgtttcttgctttagtgaatgatctctacttaaattcgtttaactgtctctctgcagatgtcgttttgcctttggcgggtaggaagcttggaggagtgcagtgcacggtacctttttccaggacaacgattatgtgcagccacttggcgacgttactcctcactaagtttacatcgatgctctggagactgcatctcttccattcccagaaaagcgtcacccactcttcctgtgcctcccataacagcttcttgagcatcaggtcacactcaatttcggagagctccgacagcacaatctgagacatctcctctatgttaagagtgtgcatgtgcgcctgggactcgtcaaaatagttctggtagcttgcgtatgttttcactttctcagtcaggttttcagttttcgctatgtaggaattgatcatgtccttggcttttgaaactgaagtactggcacacagcagggcggggtttctgatctaaaacccagaggaaaaatactcaaagaggcaagactacccagaacacaaccatgtcttgctggcaccacctctagcaaataacctactttttgacatgataaagtgaatggaattggaatattaccacctgactcaagagcctagaacaattttcagagagtctgctttttgttgctcccttttattctgttgttgaagaactttgctaccgtgtttaatacattcatccgcatagctaaagaaaatgctaaattccgggtagagcggaaaaaaaaggggggggagttttgtgatcttatgtcccattaaacttcacaaatcatcaaaactctatttgggaatcccagggtgtgttagcttcttttccattgctgggataaaacaccatgaccaaggcaactaacttacagaagagtttgggataaaaacctatcgcagcaggaaagcagtgactacaaggatcaggcatggcagccagagcagagagctgcaccctcaagttctctcaggatgcagagaaggcaaaccagtatcatgtgagggttttactctgaaagtccacccccagtgacatacttcttccagcaatgccacaccttcttaaccaccctagacagggccactagctggagactgagtgttccaatatgggcatttctcaatcaaagcaccacacagggcaaatacatttggattaaattatttaactgggatcccatagacaatgagtatttacacacatagcattacagaagactgagatgaaaaacctaataaaaacataaaaagcacttactttatcttttaacttgctgacctccactcttaaaccaacaatatatacatccaaactgttcctgaatttagttagggtgatttctttattgctggcaagtatccttatagctgtttttagatgatttaacttcatgaaaaggattctgtagatggcattctggtcttcagaaatttcgatctggtaatgcctcacaacagaatacagctgagaaattgtggagaaatctttctctaattgagataaactcgaggaaatatcttccaaaaaattaaagtgatccacaaattcccctacttccacaggctcagaatccagtttgtgcagtgatgagtctaagatctgaaagtattgacgtgccaatgataagtatgcaataatttcactgttttagaacatattgtttgaatcttggaattctgacttctacagatgtaatttccgaaaacattaatatacaaagggcacataattctaagtgtttgctaactgctagaacactgacactactaaatccctctaccatgagcagaaagggcttgactatgtttcacatgtaaaataaatggtataagacaggcaagacattctatggataacttgaaataaataagtatgatggggattacaagagtggggctggaatattggggggggcacaccatcattctgaccattcatatcccaggttctcctacacggccccaccttattgagagagtgtgtttgcaaatcagacaaggaactgaatctcaagttagtctaagatcagaatgatggtaaagttacagaatcgtgattcaaccctaatccgagaggcttcttcttgcaatagatggcagttagcagagacccatggctggctaaggtgcagagagtaagaaacggtgggatgcctggccctaaatgggacacctattcacaatcctcccctccaaacttcagggattgttgatgaagagggggcagagttggtgaactcaggggaacagtcttttctggacacaacagggaagttgtacatatggacgcacagcaattgtaacagccctcacaagacctgtgaaagctcgagccggaccaaatcccagcatggagaggggagatggacaggaagtcccacccccacgagggagctattggcatttgatagcttccgggagagggagagtcagttttcttcaatggtctgacccctggtagctcaactacactccggaataggctctacacttgagtagctgaccaacatagattagatttgaggggcttaaaaaagagacagaaaggcagcgcaaacttgggtaggtaggacgtgggggtagacctgggaggaattggggaaggagatgaatatggtcaaaatacattgcctgaaagtctcaaaaaagtaataaatattatttttcagtagtgaataattgaagttaaaatgtgagatggtgtggggaaactcttaggaaggtaactctatgaatacattttactgcccaacttcctagacccagagtgggcacgctgccttcttctgccctgctgcctagaagaggcatttgatgtcagaggtgcctaggggaaggcccagtgagccccaagcatccagtactctctgtgactttgtggagtctcaaagtaaacttaggctgtctcgctgtaatactactctctgacagagggattacttctaacatgtgtaaaccgcggttcatttcttttggtggttgtggtggtgggagggggtcatatgtacctgaacccagttacattaacaatcgcctgcaatggtcagcctgatggtcagcccagtgcttctccactactggcacttctcctttagtaattagcatttttaaaacgattcctggtccacccaggctctgttagatacttctgatgagattttatgctacattaagactctgtctgcgcaagaacaatgccaccttctcaccgttatattgcagaggcacagcactaactttaggtttaagaagtattggtggtctggctaaataaagagaagatgacagctgttatcatagattccagtttttaagcaggtcgagggcattagtgaggatgctggtatagacaatggctggcatacaaggatccatatttgtcctagaaacttaaatttggggtgctcccaggcgtttacatgctcgaagttttccacagaagcttcaaatgaccatggtcttagaaatttgtcccataagagaactacccccaatggcagcctgaattcacactgaacactcatcagcgatccaagatttaccacagacactccatagtatggtggatcttatgttctaactaagaggatgatgaacaaaggaacatctaaaataatgccagatagtgatgcattgttaaaaaggcaaaatgggggaggggtggaaaaacgacacgggaagccgcagcttgcagtgtggttacagacagttctcaggtaggtgctggggagatggccgagttgggtaaagcacttgccatgtagtctgagggctcaagcttgcctctccacaaactgtaaaaccagacacagcagcatgtccataatcccagggttcccagggccagatccagtggagacagaagaattcccagaagcccaagggcctggtttatgctacaatcaggagacacgatttctctaacaaggaggaagacaagctaacactgaagttgttctctgactgccacacttgtgccacagagcacttgccagtcacacttgtatgtgtgaatgcacacacacagacaaaggtgaaaaacaaaagcaaatgtaatcacactactttcaggttctctgaggataacacttctgcatatttttgagtgtgtatcttacagttaatcttacggaaaaggacaggtttaaagacttacttccaataggtttgtattatgttcctcaattgcacagcgtaacaggttgtagctcatttctataatgctgtcaacatacggtaagcatgctaattgataatccaaacttttcacacaaaaaattccaaggcgcatctcgatggacatagtcacaatctgttttaggtagtttctgaatttatgtattatagttttaaactctgttgatgttaacatccccatgaatggcagtttcatactcatgactttggccttttctaccatgtaacagtactttaaaaacctgcagctgtaatcgctaaccaggcccattgaattgccaataatcgccagcagactcacaatctgtgaatgacaatgatatagtcatcagcacactcacaatctgggaatgacaatgatacaatagtcagcacactcacaatctgggaaatgacaatgatacagtcgtcagcacagtcataatctgggaatgaaaatgctactcaaaactttcatgataggagtggaaatgcatagtttggcaaactgatagtttctgttaaataatggtccttgtgcaagtcattctgtttggagctggaattaaatattgaaatatgctgaaaacaagaccaagaaatgaaggcaactaacacttgacttttatgtaaagcttacacagatatttagttttgtaatcaaggtgttaattgaactatgtattacagagaccagccatctgtttcactgcttgtcacaagattttgaagtgtctctcttgagatagcctcagagaaagctagtcctatgtattcacagcttcacctggttcttaagacatagttgttttggacagcatagaatccagacacaagctgaggtaatgatattctactgtcaatttggacaaaaatatatagttaggtggcaagggaaggactgggaaatggtgagccaacatattggcaagccaaagtcacaaaagaaccatagggatgaaaactcacttccacagtggaggtttggaaaactagggtaagtagagctcagacgggtgtggggggggagatgatgtagagtcccactgggatgacgctcccgttgccatggattaggatgctctgaagcttcccacacatcacgttcatagaataatttcagtggggttctgctcccttaccacccacttccaagacatgatatcttgaaacttactttgttttggtagttagcatctgtttcaaagaggatatggaaatctggccatcgaatcagcttcttgtatttggatacattttttgtcttattaggtaaatccggggctgaaaccaaatcaatgatgttggagaggcgagggtcttggtgaagaggcgtgatggtggctggaacacagcattgaagaattagtatttccaggagtctttcagaagccacacttgaaaagtagccacagcatttagtcctgttcaaaactgacagagacttgattaatgggcagacattactctgtattgacggagggattcacagacatgtgcaaaggtttgcatttagcattataaacagaaggaactgttacagataatgagtcgtggtaggagcagccacacaaagtaaaacctgggaatattgtcttttgtgtggaaagtgttatactgttctgagtatacaagggcaaggcagctactgggaaggagttgacagtttagatgtctgtggacctttcccttcacccccaacaaagaaaggaaacttcgatatatactttacagcttacacaattaactccagagtacataatggatgactcctaggagaaaatagtgggaccctggattaaggaagttctggacacaaaaccaaaagcataacatgcatggtagaaataaattgatatgttgggaatttatattaccaagtagtttagctttattagtgaaaatgagagctaaggcaaaggggggaaagtctttgcaaatcttacagctggtaacagatttgacctagcacacttaaaagatctctcacacacagcagccagtaaacattgacaaaacatacagatgataactgggataagggaaaatgaaccatctatcaagtcctagtgaaacagaaatcaccaaaatgtggtattactacctccccattgaaatggagagaggaactttttaaaggttggcaatatgacatgggcaaaggctaggaaaacccagaaagcgccatgcaccacaggtaagaatataaagtaattctgctacactgaaaatataatctgagaattcaaatacaattgaacctatggcacacatatgtggtgatatattgtttctgatttaataaatcttgcatggcgattaaaatgtaaagctagccacagccatagagttgctatacatctttaaccccagcagctatactgctagccatagaagctagttgtggtggtggcccacacctttaatcccagcactagagaggtatatgagacagagcaggatctcagcgctggcgttcagtcttagggaattagtctccagccacgttgaggacaggatctccccagccttgatagagataagagctctctggtggcttggtttgttttgcttctctgatcttcagcttgaaccctaatatttgtttctgggtttttattattcatgcttcacagatatgtaaacagaagatggagtaacgactattccttatagaaaaatcctgagtgacaaatgtgtgaggaattagaggaacagacactccttttgggaagtcacagttaactgatgcaggatttcccactgatgaatgctaaaattaatgggtgtatttttcagcacaaatacaatgtttgtattatcttataactctccccaggtccaccttagcccagaacttgtgattagcaacaagacgtgcagcctcgtgtgctactgacctcagacagtgaaaggatgcccaactattacaacatcccagccccaaatgcatcatctcatggggatgcccaactattacaacatcccagccccaaatgcatcatctcatggggatgcccaactattacacatcccagccccaaatgcatcatctcatggggcagacaaaccaaactgacgtgtctttatgggataactaactagtgcattaaaaaaaatcccaagaaaaggagctatcataggtcagaagactgaggagacaagtgcagtgtggaactgtgtgtggactctgtggactctggatcctggaatggaaaactgacctccgtgaagtggctgaattttgtcatttcattagcactactgtacagttggttgtgcggtttggacgatcacagcacagggtgggggggcatgtgaagagcatgcaaggatgctctactatgtggtgactttcatagaagcctcacattattttataatgaagatttcaaaaacaaatcaaatgacaaaaacactgtgtattgaggaaaaaaagccatggaagtggtcagatgttttaacccaggaaacaaagacctcaaaataaaagaaggaaaggaaatctaagtggcaaaaggaatttatctctagaaagacagacagggggcctacttctccacacttagtctccctaccttaaacttaagaaacgttagtacagaatgatacatgtctataatttctatacagtagttaattccaggtgataaatccctgggcggaaacaagtctgcagtgataaaagctagaaggcaatggcatagatctatagctgcctgtacttagcaaaaatatgtcatatgacaaatgagttgctaagggtcctactagtttaatttttttcctaaaacttattgtgagaaatgaacaaattctttggccaaggaagtcactgccatgtaatctcaaattattacacatagctgaaaatactcatttaaaatttattcaaggtggaaacaagatctttgtaatgctatgaaacaaaattcaaatacttaagccttgagctgcttgccctattcttatcttttatacattttgtttatatgcatgcaggctaatcttggttgtcaatttgactacatctatagtctatcatctattaaagccaagcagctagacacacctgtgagggatttgcttgacccgatcatttgaaatgggaagacccaccctaaatctgggccacacctcctagtgacagcccacatagaaggacatgggagaaggaagcttttgctcttttgcttgcttgccctcactctcattggcaagttcatctatcctgttcctgaggcagtccttcattggtattagaacctacttctttgggatactaacagaaactgaagactagaacttctctgggacttcaacaatcaactggagcttctgggacatccagtctcatggactggacaaccaccactgggacaaagccattgttggactaccactctaataaatcctcctctctctctctctctctctctctctctctctctctctctctctttctctctctctctctctctctcgtgtgtgtgtgtgtgtgtgtgtgtgtgtgtgtgtgtgtgcacagatatggatatgtacacacacatatgtatatacacacaaactcattccatcagttctgttcctttagcaaactctaacaccatatgtgtacacacacacatacacacacacacacacacacacaccccttcaaataattccaaattaacattgcttgatcctaaacactggaattcatggtatcttatttataactgccttatatattacagactaagagcatcacataataatcaatttaaaaaggattttcaaagaaggtactaagccttttcaagtacttacttatatatttttctatggttgctatcacattttgaatttgtattgaaaagtccagtctgttgggatgtataaggaggtttgttgggaattcattaaatctgagagaaagcaataaataaaatatattcaagtgaatacagtacccaacaaaatacatctacttattttaaaagtctcttacttacttattatagatgtgcccttgctcagactcaagcaggagtcctgtgtctattagaattcattgaaagggagaaaataaaaattgattaacattttaagattctagacaacaccttaatatatatgaatattttctaaacatccagagagtcaattatggagacctgctgaaagggtattccatcagcagacaccagactctgatgccaagacaggagatgtcagataagagtcccagagtgtgttctcctttactgcaggtctgggagaaggatcagggcctcacacatgctaggcaaacactctaccacggagtggcacccttgcttaagagtctgcactttgggcagccattccaggtaagtgcatgctgatcaggagcgctcggaagcccctgggtgagagatcctacacatgtcaaaggtactgtcacccacatgttctgtccctgcttgccatagcatgtatgaatatcatactacccaaactcataaagtgtaaacttcatttttttttttgcttattatttgcagctgccagtatgcttccttttgtcttacctgaaaggatacgtctgaggaggataccaaacttgctcggctgattgtatttcatgagaaagtcttcacttgaggttctcacaaaacttcttctgttttcaaaatagtcatcatcatcatcacatgatagagtatcatcaaggaactgctcagacttctgagccttctcttcagcttcctctggagactcattcgatgtgggcgttctcaaatgtagttgtacttcaaatactggtagatatgtttttttcaaatccatctccagtttctgtctatgtaaaatctaatttagcaaatatatccacaagacaagaacaaaataggacatttaatttgtgataataaagtttaaatagtattgtaaattataactatatttatatgtcaaaaagcagataaataaaatgtgaattaatgtcagtggaaaatttgggataggcattattacagccttttacaattggagaagaaggcatacatgtgtgtgtgtgtgtgtgtgtgtgtagcaaacaatcattaatggaatttttaattctggaacttgctatccatcttatatcaaaatttgtattaatgcttctaaggagcagcttaccgcatcaatattagtgtctggcttgggttccaagttttgaacaggaggaagatgaggtaaacgtgaatcaatgaattcttcatcatcacttgatatctttctagaaaagatcttccttgctctagattaagaaatgggaggcaaatttatttttgaaatcacatattgtaatatttaatatgagaatatattaagaattcacataacaagcaagaaaagaggaaaggaaggaaggaaggaagaaagaaaggaaggaaggaaggaaggaaggaaggaagggtaagaaagttaccaatgtggtaaagggctgggctgacaactccgttggtgaagtgtttgtcatgcaagtgtgaggacctgagtttgaatcatcagaactcacaaaggagccaggcatggttgtgacatcaatatactctctgtggtggcaagaaaagagggagacacagacagacccctggatgcttgcaggctaacgagccaggcctacgtggtaaggttccaggtcagtaaacaatcgtgtctcatacagaaaggtggaaggcacctgaggacaaacagccaagagacaatgtcctctgaccgccacatctaggtggcacccacatgtgcagcaggacagcccccacatcacacccaaacacacacacatacacagacacagacacacagacacacagacacacacacagacacacagacacacacacagacacacagacacacagacacacacacagacacacacacacacacacacacacacacacacacacacacaagcagggaaagaaaacaatttggctggccctttctccaaagatgtactagtagatgataagcatagaaaaggtgattaaaatcactaatgattaggaaaccaaactaaaatctcaagagattacctcatacttataacacaaatagtaaaaacccagacacagatattggggttcaagctgaaggtcagagaagcaaagtggccagccaccagagggctctcacccctaccaatgctcagattgaatgggcgatccaccaaacctcggattgtattcgccaaatttcagactgagagctctctggtgccttagcctctttgattctctggtcttcagcttgaaccccaatatctgtctctgggtttttattatttgtgttaaaaaacactcaccagactagatccatgttggtgaaaatattagaacctggtatatattcctgctatagactagactgatgcagacagtgttgtgggaaactggagacatgcttcttaaaatgttaaatgtggaaatgtatgatccagaaattctaagtgtatactgcagggaacagaaatgaggtgcccaagcagatgttccaaaccagagtgcacagctgcattctagccatagtccacaggagagaaatctaacacatcagtagagacggacaatgtactgccaacagataacagcatgactgagccttgaaagggaatgaaattctgatgcatgcttcaacacagatgggtcgtaaagatactactctaagtgaaatatgccagacagaaagaacaatgtccatgattccagatacgcaaggtacccagaacgaatacattcttagaaagggtgccatgcttagaaaggggagggtaatgtggagttatgtcgaagattctggaagtagatggtggtggccgtacaactctgtgaaagtgtgtgatgacgctgaacagcacgcttcaggtgacatctttcatgttatacagatctcaacctcataaaaatgatgtctcatgccaggtggtgttggcgcacgcctttagtcccagcactcaggaggcagaggcaggcagatctctgtgagttcgagaccagcctggtctacaagagctagttccaggacagcctccaaagccacagagaaaccctgtctcgaaaaaaacaaaacaaaacaaaatgatgtctcactttagcaggaagaagggcagaacggaaaactccatggtattgagtctgaactggggaggatggaaagatagagtacactgttaggaacatccatcacacagggactgtggatagaacccagagcctcatccatcctcacacatgctctatgataaactacgctctgtgtccccagaggaagtaacttgtagtcaggaagacagagaagtcataaataaacagaaaattccaatacatggagattgagagcatccgataggaagcaagagacgagtacagccagaatcatccagttctacctaaagagacaaatgagaaaaaacgggaaattggacaaaggggaaagaccaaaacaactgacaaaatgaacagtaagtataaatgtaatttaaggtatcttgatttccttctcaagagacagaaactctctggcttgtttaaaattcaaaatcgaattatgtttctaaagtccctcgtcaaaaaactaacagaggatccacttccaacacagagccaactaagatccaaatggtccaacagttgcaggacccgcaggagatcataagttgccaacatgtgtttgtgtgagtgggagtgaagaccaagaggagctggggtgtactggagactggcccgggcccccactcacaattcctgatgtgtgaggaaaacaaggagttgagaaacagggggatccaggaagggttaaaacatctcaaatatttttagacatagagcaaaggatcactagcctcctaggagctaggaaacaaggaggaccccaagagaagattgcatagccccttgaagaaggagacggggacaagaacccctgaccaaattggggcctgggggcagggagaggaaagagagtcttcatccagttgctgttcgaagcagaaacagtcacccatagctaagcactaaaccatactactggaattcagttgtggggagggaggagggttgcgcaaaggagccaagacggggatggagagacctgctgaaacagtggacctgacctgatgatagaatggagaccctagtcataaagctggggaaacagcattggaccaaaccaaaccctctgagtgtgggtgccagttaggagcccaagacagcctatgggacctctcaaagcagagccagtctttaaccctagagcacaaatggactttgggagctcattcccggtggagggatactattgcagcccagatacagcaaggagggcctaggccctcccccaaacgatatgacagactttgaaggcccttggtagagggcctcactatccctggagaggagtcgggggatgggttgtgtggggaacatgggatgatgggagggcgaggggatgggggtggatatgaaaatatgggtaattaaaactaataataaaaaagaaaaaatctcaaatatctgcagcaaagattccctttgctggagaataacctcaacccagagaaacgtcacaggggacaggtctgtgttgtgtgggctggaaattaaaccacataccacccccccccacacacacacaccaaacaaacaagcaagcaaaacctgagatattgtcctggggaccaggctttagcagctcagggattgagggagacccatggagtctgcaaactaatcactcatcttggctcttctattgagggggcaaaacttaactctctggggctgaccaaaaagggaaagcacatattcagctttagggtctctctctcatttctttcttctttatttcttctcttacctctatccagaggcatcccttctgtctctctagatgtcttccttctggctcgatttttccccttacagcgtctacaccccagcaaaatctttcaagcagtataaaaattacaatgtggttaccttccctatgggttcaatacaatacctgtaaaaatctcaattgtcattttttatttcttttcagaaatcggcaggttcatatagaatggccaaaacaatatcaggggaaaaaaagagcaatgttggaagactgacagttcctgatacaaagtagaatcatcaagacactacgatactaacagaaagatagacataaaaatagatgaaacaaaatgaagttgagaaataaatctatatacttatagcaggctggaatatccactgccgaaagaattcgatgaagaaaaaataattctgggacaatggaatgatcctatggaaatgatccctgtcacactacacataaagttaatttgcaacgtatcaaaggccgactcaaaagctaaagctacaaaacatgtgacaaaagacatacatcttcaagaccttggaaaacaaacagccaacaagcacaggaaaaaatgttcaacatcattagttattatagaaacaaaaatcaaagtgttaaaatacagatcgatacagatcgcatgatggcagctactatgtatcaggcatttattctgtgtttatcagcaacgtgatgacacagtccttattactatttccacttgataaggaaatttctgctttatttccacatgaggaaactacagaacttatttaaattttgttaggctaagtcatgcaattcaaattcatatttcactgagcactttgtattttatacaggaacaaggcctactcagaatttaaagggaaaaacacaaactttccttcaattcatggacaatattaaggtattattgatgataagaattacataaatgagtgtaagttgtttgctacatggaagatttccaaagtccaactttaattcttggatattttctccatagttagcaatgtattacaagaatataacttccctttattagtcaaagcttgggacttacttcatgagactttcattgttcttttcctttgaaaacggcattctagcagagccactgaagagacccaaaagctggctgagtgtagagttcatgagctgacgaatgagttcttgaaacaggtaatcgatcagcctagaaaacttcatatttgcttctaacaaacaccgatactggggcaacttaaaatgtgttgtgtcgacttcagatggttttgactcaaagaattctataaggtctttcttttctgcaacctataatttataaagtagttgggaaacatggcatttccctatgttaatgcaggcgatccggggtttatagtattgtaattagcctgagcagtatataaaactaaattttatcatcaactttcatcaacattttaccccacgtttacactatatttaaacactgtcaagaagagagagtccttgtgtgttctgaagccaatgatgttcagaatctcagaagcaggtctgttgggaggacaggcaggggagtgactccaggcacttacgctgagggatctccagcagcacgtggggtcagaatgccttggcagacaaggtttccctgtattagtgaattctctttataaaaacctcagtaacgtttcgtttcatctagatgtttctcctgagcagtggagttttcttcatcttgtgaacactaagaactttgttagtattcagggtccctttatatgtcagctcgggctagataggaagcgtcttgaaatagcatgagatatttataattcatacactcatagatatacatctacaaacacatacctgcatgccttattgcattttgcagcatgactgaaaaagttcttagacatagtaaatactaacactagttgattggctaattaaccacctttgactctactgtccatttacaatgctttttttcaggaacgcaacttggaataatcactccacagaattacctttaagactgtgcttttcatctcttcaattgccttagtcttgatctcctcaagctgtgccattgcctgggtggcctgctgtatctgttcttcacaaaacgtgtccagagtgtaagttcgggaattgtccacctaattaaaaggcagcaaatggtgcaggtttgaaaatgaaaagtcacttacaaagagcaagagataaggcaaatgtattgtgggaaattaccaatacggagtcaggtagaaatataagggtatttaatagggaaaagccttacttacagagcaacctagccagctggcgtggtagaggtctgtacagcaagaagcaaagagaaaccgaaaccgaaaaccgaaaaacgcagtcccactacgtcactctgaccatgccctcacaagcctggtcaggcacacctgtagccagcccctaagaaggcgtggctacagctttccctacacaaatgctcaccttttcatgatgactcttttcaagagtctaacttatagcgaaaatgtttttaaaatttaaatacccatagttacatgcaattaaattttttgagtcagggtctcactagcattgctttctttaggaacagtcccaaatgttcttggcaccagggttacctgcgacactagctgacaatgtagtcaatctgcccgaccgtcatactctccccaacagacaagacatagtatctaactccttaccaagcatccaaaataccttttaaaacacccaagtgttaggattaaaggtgtacactaccacacctgccctactcatcgtttgtttaaaagctttattatccattgaattataagacaacctaaactaggcatttcctcctacacacacaaagactatattaagatgtttatccctgaattgtcacatagttaaataggatttcataattttgatgtacacagagagatcctgtctcataaaactaagagaaaggcaagatagaaatactaaatcctcaatgcagatatataaaatacagccaggtggaggtggtgtgtgcctttattctcagtgattgggaggcagaggcagtcagatctctgttagttcgaggccagcgtggtctgcagagtgagttccaggacaggcgccaaagttacacagagaaaccctgtctcaaacaaagaaacaaagaaacaaacaaaaaaaccaaaatagaacaaacaaaatacattttatctgtagtgattaatttattttcctcaattttcacttcctcagaggacactgaacaattcatactgtctatcattgattctaaacttacactgagtgctgagctaggtgtggattcttccagggtctccccacatactggaacagcaaagtgaaaccagctggaatctggtttaactctggatgaagcacttaaggcttacaattccaccacaaactgattaagtcaggccacgggtgccctcatctcctaaaaccctctcacagtaaagttgatttatttaaaccaataccactgaattctgctttgtgatgaactcttggcatagaaaataccaagggatggttagctattaactactgtgtgttacaaatactttcgcactgtagagagacatttgacaataaagggcttcagtcacttctgctaaaatatcagccggaatttctgagaaatgttgactcccacggttgactgccatgttctttaccactgcctcaccacgtcagtcactcacactgagtggtgtacagatctaggaattgcggttgcttccattcaagcctctggggcgccctcgcggtgtctgcgcctggactggtggcggcgggtgcctctacccaccttcataaggcgtacagctgagggattgtctttattgttctttttgaggttcagagcatcttcaaagagtcctttcacataaagcaaacaactttgaaacaacttgtcagcactaaaaaggtgggcatacaagtacaacctgaaagataaaaacatccacaggcttagctctccttccaaaggaataaagccaatgaaaggtcactgcgtccgaggaattttgatatttccaattggatttccaagccatgctatggaaaatcaattacgtacgtgtaccatcaacttactaaatttattaaatcaaaataattttctccaagcgacaaggggaatgtttactgaataaagggcaacgtggcgaataattctgggaaactactatttgtagcctaagtagagaagggctttcctccttttttctgaccctttctttctatgggccctgattgcacaggtcaggcatgctgcagcccatgacgctggcgaaaggacacaatgggagcaggagacaaggcagagaaggagaaaggcaactctttaaaacctggagcagccagagcaaagctcacttccgtggaggacgagccctctgccttccatgctctttgcgtggtaacacatgagacacttcactaaagaggctatacagatggtgaataaacacatgaagagatagtcaaggttagagaggaatgcaaattagtaataacattaataaaatacacaccaaaacatgctgagatgttattacacaccagtcagaatgcctgaaataaaaaccagggacggcataaataatatcaaggatgtgaagatactgaattgatggtgggaatgacaactcagccattctggaaatcagtttgtcagctacctcaaaaactaaatacagctgggcaggtttctgcatgcctacagtcaccacaggaggctaaggcaggacaacggtaaattctaggccagcctggaatatacagtaagtccctgggtcaaacaaacaaaccgacaaacaataaaaccgcttaaacatccagtgaccgtatgactcagaattttaaccttgggcatttgccccagatcaccagaaactctagaaaatacacaagtgcacatcagcggagaaatggttgaacaaactaaactacagtgcacctgtgtcagcactaaccaaagaactgtggatgtgtgtacaaccaacaaggatctccagtcagtcttaaatgttgaatgattctttctacatgacatttggtattctttctacacagcatactttactgaagtacgatggatagggtaaagatatatatatatatatatatatatatatatataatatatatatatatatatacacatgtgccccccactggagtcatgtgtggatttgtgaaccatcacatagttcatgttaagagtctgtgaacttgtctctcacttttattattgtttcctggtaagaaagctccttcaaggccaggcatttggtggcgcactcaggagtcagaggctggcaaatctctgtgagttcgaggccagcctggtctacagagcaagtgccaggataggctccaaagctacacagagaaaccctgtcttgaaaaaccaaaaagctccttcaatgacaaaaccacagagctagaacatagaacagcagttacagagtaaggagagcagtgggcagggaagcgatggaagccatataggcaaacacaatagaccctgtggtgatagaaacattgtgcatatcagttaatgttagcattctggcagtcatggtgttccatgatattgtgagctgtggagtctggggaggggtggtaggtaaagggcatagaggatttctctgtattatttcttacaaatgcatctcaattcacaattatagcaaaataaaatctttactaaagacaaaacaaaacccactcagctgcttaaaatcacacaacataggaccagctgttacctatgactgcttcattcctgtttggggaagaaaaaaaaaaaaacaagatgaaggcaccagaggaactcagcaggaactcacacagcacagaagtcatagcaggatggtcacaggatagcatcctgcaacatacaggagacatttaactcttccacagaacacagatgggttaaatggcagacttggggaggtagcccagtggcagagcacttacctagcttgtacaggactcaatgtcctgcctatagcaccaagaaagacaggaagaaaggcagcaacagagaggggaaaagagaaatagacattaagtgtattcaaaacatcagcctaatgtgacttcccaatctgaattaaaactcaagggcatctattccgtaccacgtcttgaagtcactttgcttttggaatctgtaggatggtataataagctttacctgctcttctctgtcttaatccttttcacattcatcttccaagttacaaaggctttattcatcctgaaaggaaaaaaatacttcttatattctatatctgcaagtcatatagttatattgaacaagtctattaagagcaaaataaccttagaaaattccttagactatgttttgtctacactactaaaaagtaaatgctaatcatacaaattttcttcaatcaacaaaatataaaataaacagcaaatataaatgaaagccactggctttcttatagatgcagaactcacttggctgcaacatccagataaatattaaaaactatgaaatgtattctatgatgaattagtttgcaatataaaacagaaagggcaaagtgaaggggggcagctagcaaggggaggggtcggtacagaggaagagtgaggagggaggaatcacagtaacttgtttgatgaagcctcaaggaatcttgatttttttttaaagatttattttatttattatatatacattgttcagtctgcatgtatgtttgcctacatgccagaagagggcaccagatctcattatggatggttgggagacaccatgtggttgctgggacttgaactcaggacctctgaagagcagccaatgctcttaacctctgagccatctctccagccccaaaatatcttttttgttttgttttgttttctgaggcagggtttctctgtgtaacaggcctgactgtcctggaactcactctgtagaccaggttggcctcaaactcacagagatccgactgcccctgcctccttagtactgggattaaaggctacaccaccaccacctgacagaaacttgctatttttacattaccgaaaatcataataacacattcacgtgtatatgtaaacatatacacatatagacacatatgggtacacacacgcaaacatgcacacacacacacacacacacacacacacacacacacacacacacacacacacacactaaaggaagttatgaaagctaccaggcaactgatgattgccgagagatggaggattagcctgtcccaaggatgaggcccttaattggttcctgatacaaagtggtcagctctgaaccacatacacataagcagcaaaagtgcactctttaatcccagcactggggaggcagaggcaggcggatctctgtgagttcgagactagcctggtcaaccagaactagttccaggacagcctccaaagcaacacagagaaaccctgtctcaaacaacaacaacaaacaaacaaacaaaaaatcaggaaagaaaagacttggtatgaggaagaggacgtggaaggagttgcagcaaagggtcctgggaggcgatgcatagagaaaaggcaaagtgagataattgtattttaattagaatatataaaacaaaataaacattaaaaagtcaaaattaaattttcaataactgctaaaaactttgtattgtgctaactaaaattaaaagttagttatgaaaaacagatgcgtgcgtaacttaaaaatcccaaagaacctatacacgggagccctgagaagtctgcctgctggttattcatcatccataattttcatatgtgaaacagaactgacacctctgtgcaagttccctcaacttctccatgttatgtccctgtgggaccagctcagtgccactttgccaggcctccctcagcagagactgacccctacgtatcaggcctgttgtatgatcgatccttctgtctgcattcccttgcctccctttgcttagccagcagctctagttacggctctcagatgtaagttctgggaggcagacacctacctgtatcttttcatcatcctgcttccacgctcataccaaccgatgagtaagtagcaaatgttgcttagcaagggagcagcatgcctgtgacaaagtcttgtgcacttgtctgaaagctcctcagatccttagtaaagctctcatgcaacatttaacaatttaaagtattactcaactgcgactgggagggagctgtgtgcaggagcgtgtgcctagcatacggcaggtgccaggtttgatgcatgtatttaaatgcttaatttatacatttcacatattacatattgatatgtttatgcaagtaagtaattcatatatttcctttgtctttgacaagtaacagcagacaacaaggaaaagcagatgttaaagaaaaaatgaaaataataaacggggtgtggtacaaacactaaaagaccaacagtgatgtccttgaccctccggctcctacaatccttttccccctcttttgcaggagtccccgaaatgtgcctaatgttcggctctgggtctgcatctgtttccatctgttgctggatgaagtctctttgatgacaatcgggctaggcaccaatctggtcacaggcgatggccagttcaggctatgtatcctctgttgctaggagtcttagattccttgcacccgctttttacctgaccccggaaatgcacccccactttccagtggtttctttcaacttggttgtttctccctcccaacctgattgctcgtgttcccgtccctacctgcccctcggtcccctcgcagagcctcttctatttcccctccccagggagggcccccaatgaacccttcttgttacctagtctgtctgcgtctgtggattgtatgtaacatagttgtaagtaccagaggggtcaagaactccacatggaacctcacagaatcaattaacctggactcacaggagctcacagagtccaaactgacaaccaaggagccggcatgggactgacttagaccctctgcgtgtatgtgacagttgcatagtttggccttctcatgggactcctaacagtggtaacaggggctgtctccaactcttttactgccttgtgggaccctattcctcatactgggttgccctgcccagcattaatacaaggggaggtgattagtcttactgcagcttgacataccatgctttgttgatacccaagggagaccctgccctcttcttaacagaaatggaggagtgtgtgtcgggtgggctgcagagatggggagggacttcggggaggggaaactctgccctggatgtaaaagaggaacactgtaaaataacagatgtaaaatgcatctatttatttaaaataatagtaaaaaggggcaaccgtgtaaatcctattgcaatgaggtggatgtaaagtatctcacagttaggtaaaagtttcaagaaagaatttggtccagtgacctgacccagggcctttactctgcaccactttccttcataacattttcagacccctggcatcctacatgctcaatgctcaccatttttttttaactgtctctcacacaccttaaatcagaatttgaaatttttaaagggcaggctaactgatttgtaccatacggttacccggcatctagaatgattcttggctcctcgtggatgctcaataggtgttcactaatacgaaaggcatggagaaaaaaagtaaaacccacagagaccattcaattatgtttggcaacatagcatcagtttttgtaacatttatccagaaaagactaaattttttaaaaaattgcccttaaatggttaaagttccttaatctgaaacacatttttggaaccccccatcctcctccacatcccacgggcagccccattctagaggaatcagatgccacgggggcctggctctgggaacaacagctcttaaaacgccatcaaactaccaagcattagtttcctttgcgcccatctcaccggaaattgtaaaatatcttaaactgctgcagtaaatagaagacatgtctttccaggagccagtccagagtaggtatgagctccacttcttccgagttgatgcctgtttgggtgatctgtaattacacagcacaaactgtaacttctattctcaagatgctggaaggctctattcaccttttaccccccccccaccagccctcacccactgcaccagcacccagatctgacttccctccgtacactgcctgctatacttggcattctctcctgcttgctttcatgtgttcctacagaacgaataggaaaaacttcccctctacccagagatatttttcgaaataacttgacaagttttctgtctcacaatcttcatattttgtataaattgttatgacatggctgaggatgcctgcctcacacacatgaagtcctaggtttgtggtcctgctggagcacacatttgggttgattttagttggatcattgggagagcagagggaaacagatggttattaaagaatgatcaaaattggttaattataacttgtgctatcacagtgccaagtatataattggaaagatttcttcgtctggccctgaagttcctgacaaatacgccaataaaagtattcttcatggatctggaaagattgcttcactggtaaagtgcctgtcacacaagcatggagacctgcgttcaaccccagaacccacacgccaaagctgcgtgtggtggtatgctctttcaatcccagaactgggggggggggctggagagaggagcatccctggggcttgctggccagacagtctacacacacatgtgcacacacactcaaaataaatattatttatcattcctattacatgaacaaaagcatgttttctagtttttaccttaaaaaattattgaaaatattaataaagaacttaggtgaaaaactcctccaactgagtccttaaacttaaatctgtaccaaaagaagaaaattttaattattaaataattttcttccaagctgtttcttaaacattaacttcttaaattgactgggttcctctaaaccacaaagaaataaatcatattgcttcatatgtgcctaacattagataaattacatataagcatatgtatatatgtagggagacaccctagccctgcccaatagtcctgggacaggtaccaggtggacccgggactcgcccagaagggcgtggtgaaggaaagccaaggtgacataagggaagcttcttaaagactggcctcggagaccctagcccctctttctggccgcgcttgctggtttcctgtgacctcgatctggcctgcattttgccctggtgctttcttgaataaagagattttaccatcatggattacagttcatctttgggtgcatgctgcaacctttgatcttcatatatacatatctatatatctatatctatatctatatctatatctatatctatatctatatcagatatagatatagatatagatatagatatagatatagatatagatatagatatagatatatgagttttatgacccttgggctggcagtgctccctccaggagacataggccatttcaaaaaaccccagcatcaggcaggagaaacctcttttcaaactgttggtcaggggagtccaagagaccctcaaaacaatatgggccatcacagttgcccttggtctcctcccaaaggttggagagctgttcctattgcggaaggattcagaaggttcgcgctggatctgacctgaaaatctcctccctgaggacaagcttcccccgtgccagaaggtgctatgcaagctgttaaaggagacaagcaatcaacagtcctacccggttgtggtgtccctgaactacaatgaccagcatggcaggatttccctaagggtgaggtagtggcactcataccatactgataggcacagctctctgattaaatttcagtcctatcgacaggagagaaaacataccggtcctggaaacctagccaaatgtctagcactagggaggtcacggatcttagaggagaagctactacagccacctgagtagatgggcacagtccccaactgcagtccaactactaacccgtatatctgtaggtaagcgcagctctcacgccacaccaagggccggcgcctggctttgcagcaagcagaggccgttacagaaagccacaaccggtcaaaatgcagagacctcctgatcttggggtgccccgtttcaacggatacatctacagcacaactcctgcatccaacctaaggctcagggacatcgtgggggagggggctggaaagactgcaggagctagaggaccaggaagtctgctgagagagtatgggtcctagaaatgacagagaagcttacagccatgacactgcaacaatacagctgcctagacaagaccgaacaaggatgccgccatcatgggggtactcgttaggccttaataaagaaaaaggtcatgaatctgagagagaactaagggggaacaaggggaaacagttgaggaatggaacatgggaacggttggaggctatacagggggaaatgacataattgtattttaattataaataagtaaaaattgatatattaacatgaatcttaaattgggtacttttattttcccctcttctatttttctggcagggtcttattatgtggactgcaggttacagccctcctgcttctgtctccctactgctgggatcccaagcgtgtgtgctgcgcttggcccgaactggaaatattttctgaggtaattcataaagctgagcagatgcattgcacattacctttgatacaaacgaagcagtaaccatccaaaatactttgcaatttttcgctttgtaggcggagacggcttgaaggtcatactcattgaaggcgcctctgttgttctccatgggaaggcagtatataaattcaccattgtctttcaaaggttcctcagaagcaaaagaagaagacactttgactaaagtagctaattcaatgattagacagacccagtggatacaatgttaaaacagaatcaaaacaggatattttgatatcagtgagaaaaattaacctcaaaccatgcctaatacaagttcagtaaggccagtgttaggaaagggttaagacatttcattttcatcctcagacacaatatagtgatgagacgtttgggaatatttacccacatacttgctatgaactcgatgatagaccctgaacaagtgtgccatattccattctgaacatagcaagcttaccattggcaccgatcatgatggggtcggtattctaaagctgggggaggcagcattggtgggtagacaacacacaacaggcagtaagtgcttcacatatgttgtctgaacaatgatgcctctgacgactttaaagagaccgaggcttgatgcttttcaatgtaattaatgcagaaattttaatatttttctagacctcccaacttgaggaaggccatagacaaggtaggaactggagtccaagtgtgactttaaattcacacccagagcttaagtgctaacgttcttgtctcattcacttggaaatattgagaaactggctagtgtctaccgaaactgagaaaatgtaaagtataaattttaaagctatcttcttttagctttgaaatgtgcactcttatcaataaaaattttaaaacattatacaacaattgaatttaataatctcagagtcattttattaaaagtctaacttagtaagtggtgatatctcaaaaagcattgggacccagtgcactaaactgtttccagttactgtggtcttaaactttggattcagttttttagattttacatttttttctttcttgaagtatatttccattgttgtagccatttgcttttttttttaaatttgctctgattataaccctctgattataagaaatcttcaaaaatagacttaaaatcctgaaaataagaggaaatgagataacccgagagctagcagagccatgagctttattggagctgtttggccaattacaacctttttgttctaattatattttctaaggttattagaaacttggcgtcgatgtaattatcaagtcttttttgcatacaaattaagtataatttactcaaagatccaaagcacctatgtgcagctggagttttattttgtgctttcaaacaccatgtctataatctacttgatactatagcacattctttttccacttaatcttcacaactctctaaagttaattcccattatctcaatttcaaggtcaaagaaactataaagctcagagagggtagaaacttgcttaagacgaaataatgagtggacagagattcaaaaccacacgaatccaatttatgaatgagcttccagtcaccttacactgactatgaacaatgatcaaagatattttgtccttagagtaaccatctagggaggggattggcaaactatgcctgggccaggtgtctgtttttataaataaagttttattgatatataggcatatccatttgttgtggactgtgtagcaacagtcttgtgcacagtacaggatgagtgcttccttgcaacagagttcatatgacccatgaagactaaaatgcttgttacatggcccttgaagggggaaaagataacctaaccccagggtttggagcagtggttcttaattaagtagcactttactgagaaaacagacaactagcccccctttcacagtttctgattcagttggtctagtgtgcagatgagaacatgaatttctggttaagtttcttagataagttccttttatttcttttttaaaatcactaagtgacatacacagacccccaaaagtagaatccaatttaagcaaatggggcactttcctgtgaacccgatgggtgagtggaagtgatgggggggacagtcaaggggtgtattacagacaaaactgttatgctttatctttattctttaagtaggtaaaataaattgttgagattcttttatacttcccaattgcaatgtgttattaatgagctttgatgtgatatctacaatgaattagtaaaagttgagatagtttcaagttttagtttttgatagctgaaattgcgtaagataggctcacacctttaggcttcgacacaggtcagtcttggggcgatacctaaaacaatgtggaaataccggtgttttccattcgagcttttctcttagcctaataatatgttttatggcatcagtctcttctggttctggtgggaaaagttttaaagttcaatataaatgcaagtatagtcatcatctataaataaaaatttaaacagtaagttgtagaagttaacacagatacaatgcaattaaagaagaaacaaaagggttaaactaagcttcaacaggagctcaaaaggaagcccagtatttgtctacttaagaaatatatcatgagccgggtgttggtggcacacgcctttaatcccagcactggggaggcagaggcaggtagatctctgtgagtttgagaccagcctggtctacaagagctagttccaggacaacctccaaagccacagagaaaccctgtctcgaaaagccaaaaaaggaaagaaagaaagaaagaaagaaagaaggaaggaaggaaggaaggaaggaaggaaggaagaaagaaagaaaggaaggaaggaaggaaggaaggaagaaaggaaagaaggaaggaaggaagaaggaaagaaagaaagaaagaacatcttgcacatacatgtcacatgcacacaccctcataggcatgtacatacatacagcacaaacacacgacaaggaagggggaaataaatacacatgaacatgaaactctggctggcagtctatccgctacatctttagggataacttatatggtatttgtacttacttcttactttgcttgaaatcctggagtggatttgtggataagaaaattatgtcggtcttttgctagccatccgccatggcgggtgggtgaaagacccgagctaacatggggttagctcgttaaacaacaataaagcctcatgcagtttgcagcaaaaaaaaaaaaaaaaaaaaaaaaaaagaaaaaaagaaaagaaaaaaattatgtcaactatgagtagtgtcaagaaagaaaggcagtcggacagacagacgggtgtcacaaagggtttaattacatgatcacagatcatacgccacaggaaatactgtggcggggacagtcaaagcctttcttaactaaggcctgagaggatgacaggagattcgatctgagaaagcaatgtggtttggaggcatccttcctaaagacagtcactccctaaactcctcacaaaccatatttcttgatctctttgcaggcagctagtaatttcgtgcgtctcgacacaatctgcgtgttttgtttttgcttctattgcccatgttatgcagactaccccttaagcttcattttgcacttcccccccccccagtttttaagtttcaaagtgttcatatttacaggggctcaatgtgataatagatgcgtgtgacatatcagatatgtcattaccataatgatcagagcagctgttaccagttccctctccttaaacacttctctgtgtagggaatcttaaactcctctgcggatctttacaaaatgtcagttcttctgctcatgctccctccctttttctctgggtagtgcgttagcatggccgtatgaacgtacactcccatcagcagtgtatgacagtttcctttgctcctaacccttaccagtttttctaatttttccactgttctgactggtgtgcgatggtctctcatcctgtgtcttatttaaattcccctgatcattagtggtgtgtaacaatttccacatacttgtttgcattttacaccttttgttgtgactattcagacagctgcccctttgttaattggcagatggtccttgaggtttgtttattccttgtttattttgcaaattgaccccctgtccagtgaactgtttgaaaatgttttctgctgttttgcgcactgttcctcctcttcagtggctgcttattctgtggtgcggaagttccttattgaacaacaaaacaaatcataggagcttttggaaagcacacgaggcaggccagcagtgccagcaaccctaaagcattattccgaatggcaggcccatcagaagtcttgcacagcatgctgacaaaacaatgtctttgctaagaatcaaatggaacttttgattgatgaaaagtctccaatgtttccttaaagccagcaagagacactagaataagtctgctagcaaggtagagtctgtcacagtgcactacccccaggagaagacagcccatcattctactgatcagcagagtcctcggacccctggctctcaagggaggctcaatattgcatagatgtggggtttctgctgagatattgagaaacctgggtgttcctgtgttgaaagacttaaaaattagcaaagaaatatagcccagaaactgaccaaggctactactatgacttagtgcctggaatttaccagccaccagcaattactcccttacaaggccataagataatggggccaccccccctcccaggggctcatgaaggaaacagattgccccactggccaatgtgtcaatcattaacaattaagggtccctgtgaaacaaagatagctaccattagttagcacatcttgaggtctgcaggttttacaattggtgggtcaggaggccatctgattcccaggcctcccctcaagacaaagggcttcctaggaacccatgactctggtcacatattcaaagacagaaagtcgaggctcctccctaagcttatggtttttgcctttaaaaacgcctgtgcctgggggacggtgctgctctctagcctgcatgctgagagagcccgtttgtacaaacgtctacctttcattaaagcctcttgctgtttgcatcaagtttccgcctcctccctggtggttggggtggccgcagtcctgggaaaagattctggaggcctgagcttcctgggatcttacagtgtgaatagggggttctgaggataaatccctctctgggtcatggtgctccagtaagaaccagaaaagtttcctttataaaatccatgatagtaaaatagtgatttcaagtattaagaaagtgtcaaaatgttcatggctatttggacatttaaatctttgtatcagacactgatataaatctcatatctaaccaaggtgtgatagtacagacctgtaattccagagtttgaggcaggaggatcttgatttcaaggccggcctgaactacataatgagtctctgtttaagaaaaccaaaggcagaaccctttgtggtagagcacttgcttagcatgggcaaggccctgggataaacaatccctagacacaagtatacacacatatgcacacatacaaactaggtggtagagctcttgtcaagcatgtacaaggcccagtgataaacacttctcccccatgtcacacacacaaattttactagaagcacaaaacaaagctataatttatctcacatggagttctaaaactataatctgagagtatcttcagtaagaacataatcaccaactaccttgtcaattttaatgttattgtaagtctcaaaaataattgaaaaaactagcaattctttaaggtagcaaacatgcaagactcaaccagcctttttcttttccacaaagtcagtgtccaacataagcacggaaaagcttgcaagtgtgcattgcttcctacaagctggcgcaggactgtggcatacctgtcctgtcatatgatgggaaccggcctctcttcgattttattttagtaggaatttgttcctgtttttcttttgatttccttgtctcagggacaactgattttgaagccgctgcacattgtttaccgaacttttcttcaaggtaatctgtgagggaaaacattatgaactgagtactatgagttctagaaataccatagtaacttcacataccaagattttatatgagacactagatattatatgagccagtgtgcctgggttctcaggaacatgggatactcttctggctgtcttcctctgctaggtgcaggtctgtctgcctcctctccctttgagatgcaaaagtaaagggtgggagggacatagtcactacccttgcctagagggcatccttaataactaggcttctgtgtgggccagggagaagttagagcctcttggaatagaggttaatgacagtgacaatttctcataatgatctcatcctttccatcttccacaccccactattgttacagtgggcattagttaccaccattaaagcccttgctaaggtgaatgtcagttgctctgcttggccattttatgattatagcccatctttagagtatgcatgaatactcatcagaggtaaaccttttaattaactttaacctgggactgagcacagaacatatttaagaacaaatgcagaagtataaaaagggcatcgctcacatgtctgtggctcacctaactggtgggttccagataggagactgggggaaattatggacaatagggctctttagaagcaattttatttgttcgctcacttttaacaaaatatttatgcggcaaagctacaacctagttggtgacaaaacaccttaactgcaaacaaaacacatgagtgtaattgagaccagcacatgtcatcaagtcccattgcagcccttagtccctcttcaggggacttgtctgccagaggagactcataagttcatcctttgcaaatgttgagagatggcgagactttgaattttggagtaagaagctaaggaggagagaaatgtgagacagcaaaagcatcgcccgggcgatggtcgacaagagaaagttggttttcctggactggttgtaggagatagagttagttgtacgatgcggttattccctaaggacactctcaaatggcagctgttcatagtctcacgctccatatagcacagattgggaagtgggtttgttttccttaccactccccacacaccacttccaaaacaatttgtaccctttaaaaataaaaataaaatcctactcctttcaagttcctggctttttgctacatcatacactccagcacttcactggaatccaattgcttggtccctcagttaacttgtaactttggctccacagagacaccctggatatggtagagtttgaacaaagacaaaggaagacttaaaagggaagtatatagagcagtcatgggccagctccagtgtgtgtgtgtgtgtgtgtgtgtgtgtgtgtgtgtgtgtgtgtctgtgtgtctgtgtgtgtctgtgtctgtgtgtctgtgtctgtgtgtgtgtgtctgtgtgtgtctgtgtgtgtctgtgtgtgtgtctgtgtgtgtgtgtctgtgtgtgtgtgtgtgtgtctgtgtgtgtgtgtgtgtgtctgtgtgtgtctgtgtgtgtgtgtgtgtgtctgtgtgtgtgtgtgtgtgtgtgtgtgtgtgtgtctgtgtgtgtgtgtgtgtctgtgtgtgtatgtctgtgtgtgtgtgtgtctgtgtgtgtgtgtgtctgtgtgtgtgtgtgtgtgtctgtgtctgtgtgtatgtgtgtgtgtctgtgtgtatgtctgtgtctgtgtgtgtgtgtgtgtctgtgtctgtgtgtatgtgtgtgtgtctgtgtgtatgtctgtgtctgtgtgtgtgtgtgtgtctgtgtgtgtgtgtctgtgtgtatgtgtgtgtgtgtgtgtgtgtgtgtgtgtgtgtgtgtgtgtgtgtgtgtgtgtgtgtgtgtgtgtgtgataaaacaaacagaaagtagtgaagaaaatactgatgcactttaagatcttataactcatgatgaccacactataaagagactagagatgtcaggcattcttggtggtgctgggggaattcctgttattttatcattatctgtatcagtatttaaattatgatgccattaagaatccatttggaggcatttccacctgctgccttacgggattatagaaatcaaagctcctattttggaagactgtataatgccgtgcctggccagtaatcttggccttctgctcccactgatttcaaggatcccaacgacattcgattcaccgtgacctcagccggatggctctgtggtgacgcgccatctttgctgctttcatgtttaagtcttaaacgtctaagatgtcaaaaaacaaaataaaacagaaaaaccaataagaagaacgccggcacactgtctcaaaccccacagctgtaactaacagattaacagatgacatggctaacactataacttaagattaatatttgctccgtgctctttaacatctatcctttcaagctgtgttttttagatatttggaaaacaaaactgaaacgtttccataaaaataattagtgatgaatgggtctaaccaatttctgcacaaaattagtaattattatacattattattgaaagtttaaaacttggctttattttctctgccacccattagattagtggcagagaaagttacctgaaattccatgaagagaacaacaacaaactgattaaaaatgttggaagagactttatgatagaatccaaaatcagtgactgcaactgacttttgcagtagacaaacttacaaggcagaagaaatttggggttcagtaaaaccttataaacgttatttctagatttgggtgaaaatgagtctaccgtcatattaaaccaaaatgtaacacggggaagaaagcaaaagtcaggcgcacacagcacagcttccgtgagcttacttatgggagtgttggcaggtttttctatagcctttccctctgagcattctgtgagtcccattttgttagaaatgtctttaaatgttgcctcttcattggaacatctgcctggaaccttttgtctattattttttaacttggaacagtaatccttggtctctttatacagtggacttggatgttcacattttaaaaaatactgtaacaaagttcttggcttcagtagaactgacttatcttgacctttatggttttgaatttttaggaactctatccttacccaaggtgattacaaaactcattcatgttttcctaatgtttttaaagttttgcctttcacagtcttttaattcatgcctcaattcatgaaagaacagtggaaggggctagctccgactccacccactcactctgccttgtgaatgtacaaccatcagagggccgttagttagtacctccactgtttccctcacaagatggttttgaattttattttcagaagagtgttttttttcaatgagtaatttctaattgtttgggggtttttcctagttaacttgtttctgacatacaatgtaacaagtatatcacgtttactaaaattttacaaccttgttaaaagggttgtatgactttctatgctcattttgtaattgtttcacataacgtggcagagaatttgtatcctgcagttagttgttgggggcaacaattgaccctttctgtgtcttatctactttaaaatcaggatgctgatttggttgtttctaccttctttctatattatcatctttgatgcctgatctgtcagttaaaaagagtgacttatttaaatggaaaatgttgattttttttctttattttgtccttttttgcttcaaatagacctgtttgtgtttggaatagttgttgccaacagaattggtgtgtgtgtgtgtgtgtgtgtgtgtgtgtggtattttgagacagagtctcactatgcatcaggctggcctcaattttggggcaatcctcctgcctctgcctcccaagcactgggatgatagtcatacactactgtgcctggctttgatatgaatattttaatcagaaagttacagcctattcatcttcgtttacacttttactttagagacttcttgacaggcagatactatttcctcttgatgctacaataatgtctttgtcttacaagttttcccattcttttctttttcatcccctggtatgttcttatacttttcaggatgtttccacaacatacattttagctgcattcagtttgacattttcaaaattattttaaactagtttcccctcagattgtacatatcttttgcctttttgtttgtttttattagaaacatactttagatttatcaaaaccattttattttgttaactatgcaccccccttccactcccatttttttcctgcctctactatatttctgatactttgttctttatatatttaggtccttctgtctctgtctcctgagtgctgggattaaaggtatgcaccccaatgcctagcttgatattatatttttaatttccaagagctatttccttttctacaaatgttgggtatttttaatttctcaaagctgactatttcttatctctctgcttgtcttgtgagagctttgagattggtgctgaccttctccatccatgtagtctgttccctccacacttctttgatttgttaggatttccctcatgttatgaaaccttcctcaaggtcattcattgcttatctttaataatgaaattaattattcagcagtgggccagggctgaaagaatacctgagcagacacaaggtgagctcagggtaagatcaacccaagatggtattactgggtcactccaaggttttctgaattccagaaccctccataaatcttcacatgacattttaaaattgacttttaggttagaggacaagctaatggatttcatcatggcattttcatgcatatcttgctgtcactttccccccactgtcctccccacttgacattttaaggtcggttggttggttattgatgtgggatcttatgcggccgagactggacgactgaaaccaaaatacaaccaaaaataatcctgaagttctgattgttctgcctctatctccagagtattggaatcaatggtcatgggtcaccacgtcaggttttattgctgggaactgagccaggttttcaagcatgatggagaagcaagatctctatcctgagctacatccccaccatggcaccctgggagctacatactgttgaaattctactctagaaaaaaaaaaaaaaaccaaacagaccttattttactatattttatctttacctttgtcttggcttgtgtttcttcttgaccacatgtggttttctaactgtcagatccatggacataaatgtttccagctagttttctaagtgaaactatgaagtaactgactctgaaaaaacataatcacattgtatttttaatgtaagacaaatatagaactatttgtatttatagtcaaaactgcagatatatttgccaacttctcagaaggcttagcataatctcccaatctgtgtgagcactccccgatgtgtgctaaaccagttgccttttgtgataaatctccagctccccttgactcctctctgaggccctttcttacactggtgggtttatttacaccccaactttagttttcatcacatgtgtgctaacaattataagtcttaggatcacttcctttctggagatcttcaaaaagaccttatgaaaattaacacaacaatagctcaagctactgaaataacttcagaatttaccaaagaccaaaaggtcacctccaggtgctaccttcccgctacagatagtacgaaaaacaaaagaggggtgacatatgaaaaagggagtcttgcgctgggtatgcaagtagctcagtggaagaacatgcttttagtttgtataacacacacatacacacacacacacacacacacacacacacacacacaccacacacacaaatacacacacacacacacacacacacacacacacacacacacacacacacacacacacacacggtgaaggggagaaacagggtttgtctttgtgatgggaaagtctaacttgacacagaaagtgatgacatacggacgtaactcgagaattttggcctggaaaccagtgtaagatagcaaaggccttagctaacaagctgtgctggaggtgaaccaggtaaggcaggagtagtcctcgctgggcaggaatgctagagatgccaacagaatatgaagttggcatttacagtgcgagcacaggacagtccatgaagtcactagacatggggggcgggcacaaagttcagtcaagacctaacaattatcacgattcgccacagaagggcgggctaccctcttcagccgaggactgaaggattccatgtcagggccacatcttgagataaaatgaagatacgaacctgagagattccttaaaattgagcgacaggggcttggttaattaaaatcctccctgaaacaaagtcattctgcatgtgtgacagagcagggcttggtaagttttccagaaacaaaccaaagtcattattttcagctttgtgggtaaaaagaagaaactaggcatattattcaagaattcatataagaaaaaaagaagtttctataaatttcttattgataaaaatgtaacaaattataacattgagtacagtttttgtttgtttgtttgtttgtttttgttttgaaacaaagtctcactaggtagttacacctgccgctgcctcctgcatccggggattaatgacatgaccaccaaaccccagcttcttttgttttacatattcttaatacagtcctgctaatgtaaaggggacagcatttcatttaactaggattcacaattagtgacacttgtcactaaatgggctgcaaaatattcactgtcacctttaagagtgtcacacaaatgcaggtgcaggccagggcctgcctgtggtctagcattcaccaaccccttcagcaaaactgtgtgatactccaactgctttgactttggagtgacatctatttatgctctcatcaaactcactaaatatttaataagcaaaagaaatatgttgcttagtcttggtattaatcaaagtgtaaaatgatatttttccctgcttttgatcacacaactatgaaacttattaaggaaacctcatgcatctccatggtaacatttaaatgtcagaacatttcttcagggaacaacaatttaagagttttatacagagccaaattttcatttaagcaatattgtaacatttttcaaacaagtaaaactcaggaaagacatcacacaaaagcctttcttataaaatatatatacataatacatatatatatatatatatatatatatatatatatatatatatgagataatatatgagataattcccatcaacacagatctgaagggggaaaactgggaatgaagaaatggagtatttgagcaactctgagccttaggactatagaactgaacctcattccaggtgagaggaaatctcaaatgaggaaattctcccataggactgtcctgtggacctatgtgtgggtcattttcttgactgctgactgatgcaggacagccttaacaggatgcaggaggctggtgaccactgagcagagccgtcagaggcaggtgggcctgggctgcaaagaaaggaagatgtgaacaagccttgaggggcaggccaggcttcctccacggctctgcttcagcgccttcctgcagccttggtgtctggccatcggggactatgatatgtgaaccaaatgaacccttcccttcctttcccaagttacttttgacagatctaactcagtatcagagatgcaaactagaacaaacaagcgggggcacgacgatgtcaaacagcggtaaggctacacagagagcacaaacatcacttgcttatgaccgggaaaaaaaagccaaactttaaaatctcagtctgggaatggttccctaccgcctggttgatcagttgtaactaggaaccttcttctttgaaaaggacgggacacctgtgagaacattcccaggggtcctggcacaacaggggccaggtcagatgttcgtttacctcgtgtgctgtggcagtcaaggccgcctcctcctcctcctcctcctcctcctctcctcctcctcctcctcctcctcctcctcctcctcttcctccgtcttgttctcctcttgcctcctcaccacacaccccaggagcagccagggacaaatatcagagcctacagctccagccccatctcaccaacggtcaagtgcctcgtgcctcagggggccaaggtctaaggagctgcaggcctggaggcagctcatgcaatggttgccaggggcccgagctggggcaaacgtgggactgggtgggtaccggaagtgcccaagccggctccagtggatcaatctcattgcagattagacctcccgcaaccctgcgtggcacttgcgtggcagggcccagttgtgggagcgactatggctgttaatagtagaatctgagagtttgaaagaggggacttccatttttttttttttattttcacggcctgtgaacatgatttactgttaaaaaaaaaaaaacaaacaaaaaatgttattgccaagcttggtctctatacctgtaaatcccatgaggctaaggagaagatcacagatgtgaacccccgcctgaggtacattagtgggaccctatcttaaacaaaacaaaacagcctcaagagattaataaaaaggcagtgcacacacaatgaagtggacccaagaggtataggaattccaagatgaaaaagattacatatatataatgctcatttacgtatcttataagttttactttatcctatacttcactcacccagctgtttattaaggttttactatgtgccaggcatggctgtagacacccaaaactccctttcttcgtatttgttgacagggaccatggcagagaaacaacacagagatgtgttggggtctaagagatggatgactaataaggggaggacaatcagctttcagtttttaatactcatatgactgaggacatgatcatgccaatatgtctcaataacattggatggtgaggtttgaatctttgggaagttatttggtaagagggtttaggagttagtggtgaggggacatcactttcaaagggaatattatttttaaaatgttgtgtggcaatcatatgtagctgggcagtggtgcacacctttaatcccagcactcgggaggcagaggcaagtggatctctgtgagttcaaggccagcctggacagagcaagttccaggacaggctccaaagttacacagagaaaccctgtcttgaaaaaacaaaacaaaacaatagattcctatcatggatttagatgttcctaggtacccttgactaacagcatgaagagttactattgctaaccctccttactaaatctccctttatccactttacaagagaaaaacaagccctcattcactttgaactctatcccggagttgtgtacaagtgctaaaatctataaagactctgtcttagtgactgtcaacctgatacaaccaaaagtcaactgggaagacagaagctcaagaagaatttcctccatcagactgacctgtgacagtgcctgtgagagactgttttgattgatggctgatttgggagggcccagtccactgtggatggcactatccctaggcaagtaggtcagtaaaaactaaccaggacacaaaatggtgaaaattttcagttgcttgccacacatggtctcagctaaaggcaaacaagacaaatagagctctggcttcttgtttaagctcttatattgtgactaattccctgcttgtaacatagttggagctcttttctttacatttacagccatagagcagggcaattgcactctcaaatggcccagaatcatagtactcaagtactctagagtgttcctaaatgcgagaatgctatgatgggcttagggggaaaatacggcgttggataatctttgctcaagcacgtgtaatagcactgttagtagtgagttcaaataaatcaaatatataaataaaatgtatttaaatagaaacacgcataaaacaagcatgtattggtcagtttattcaaatgtgttgaccaaagcctatgggaacctagtcatgtatatcctaattcagtatgtactgtggctttgcagactattcacttacatgaatggcaagaaccaactatctacaaagtcacacctgtgggattgagtttctgtattctctggaaagattagtacctgaagagctttaagtcaacctttccctatcctccactgttaaaacactgcaggaagacctggcagaatcaccaggtggtagattgtcaacatattttatgataaaccaacagaacttttatttttacctattgtatttttataaacataggttccatctctgttatctataaaataaaatagaggagaattgttcttcattcaatcagtaattcagaaaaatcacatctatccatagagacaggaactacttgacaaaacacactgtttacatagcaaaactgatttctaaatcaatattgttttatttactaacatttataaaaactctactatacttgtgtccttctgacccactatattctaataagtgtgatgacaactcaagttgtattagagtctaatattttgggtaattaaataagctattgttgcagagagatagtaggtcaaccaataaaagcatgataatgtgaaaagttaaaacaaaatgttcaggaacatggtttggagctgaaagaaaagaaatggaataagcttcccattgttgaagaagggcttgttccccaaattttaaaattaatagtatagtagcagtgttacatcatacagtgttcagatttctattaaactcatttaaaacagaagtccccaactcacagtgtttggactagctttagggtgcgaaagcagtaggcattagccaaaaactactctagggatagaaaagatgactcagcgattaaaagcactgattgctcttgcaaaatacctggattcagtttccagcacccacatggtggctcacaaccatctgtaactccaggtctaggggatcagatgccctcttctggcttctgcaggaattatgcatacacagtatgcttatacacactcaggtgaaacatacacatatagtaatatttaaaataacaataaataacatttaaaaagatatattaagggataaaccagttttcaaactatttgtaaatgtttcaaaaagttggaaaatcattggttcctttatttcccaggcttctgcaatgttttcctacaactgtgactttttcttctacatccacctcggcctcccttctatttgctccacccacggacctaggatgcttatgttacatgaaatatctatagcatcacttgcctatgattgatgggagtatcttagctgagctccatagtcttagggatggcttgagccactgggttcccctcagtcatctcatgccaagccaagcccccactcccaaccccccactctccactttgtaaacttctcccatggtgtcaccactgcttaggcttctgtgtcacctgaatgtcacataacaggagggttaaacaataggcatttctttctcacagctctggagacctggaagttctagatcaaggcactagcaaattttgtgtctggtgaaagccacttccctgggtgtggatggccgcctttgtaaattggacttagatggcctttctttgtaatgaaaaggagcaagctagaaaagagaaaatacaaaatgtacaacttgaggagaaaaggaacaccaggaagtggaatggagcaaagtcctatgttcaaggagataaatggattgataaatggaataaaggaagtggttacctcaaggcaagatcccacccagataagtttctcatcttgtgaaaggaaattaaagaaaagcttagagtcgggtgtggtgggggcatacctttaaacttagtacttggaaggcacagtttgccagatctctgagtttgaggccagcctggtctacagagcaagttccaggacagtcaagcttaggcactgaaggaaaacatcaaaaccagaaagttggtgaagatgtaattgaataaaggggccatgttccagccccagcaagcagcaggacttggcagctttggccacatggttctggctttagggtcaaggataaaagagacgggtataaaagttacctccatgactaaggacagccgctgaagccaagcatgtgtcacaggtgttcctgaatggaggcctggagaggacactgtgtaaagctgtggatagccttggaaagcccaagacgttggagatgccagagccatgggatacctgccgaggagagctgccaacagggagtagaaccagtcaacaaggctgaaaggagttggaaatataaagagcattttgacatcagacatggagatgcacagctggttttccatcttgctttggtcccgtattttttcactaccccccttcctccattttggagtggtaaaccctgtgccatgttatgttggaagtatatgacttgcttcttgctgttgattttatagggattacagttgagagactgcatgggtctcaaaagagattttaaactttagactttcacgtgaatttgaggctgctgtggactatggggacttttgaagttggactgaaagcatttttgcattctgatatggctcacagcctattggggtgcaggcagtggagtgtggtggtttgaatgtaattaggcccccataagctcactgggagtggcactattaggagggctttgttggagttggtgtggcctttttggaggaagtatgtcactgtgggggtgggctttaaggtctcctatgctcaagctatgctagtgtaaacacagctcacttcctgttgcctttggatcaagatgtaggactctcagctccttctccaacaccatgtctgcctgccacccaccatgatgataatgaccgaaacctctgaactgtaagccagcactaatgaaatgtttcctttataagaattgtcatggtcatggtgtctattcatagtagtagaaacactaagtcacatgtcgtgagtctgcaatgcaaggaggcacatggtgctattgacatatttcacataaaacaatcatcctaggactgagggaagcaaacagaaggaggggcagggtagatgcaaagggaacgtcaccagccaaactcccacctcctcccaccactttcctctcctctaataattctactttcaagccaccattttatcccatataagggaaagatgtgtgacaattgtctttctgagtctggcttattctgcctggcatgcttgcttgtttgctttctttcacgtccctgcaaatgttatgatttcttttgtctgtctgcttgtgtttgggggagttgttgtttgcctgggttttaaaggcagagtttcagtctgtattttgtccagaacttaatgtgcagcccaggctagtcttgaactcatggccctcctgttttagttgctaagcgctgatattataggcgtgttccatcatgtttagtcttgattcctgattttatttttctttgaagctaaatggtactctctctctctctctctctctctctctctctctctgtgtgtgtgtgtgtgagagagagagagagagagagagagagagagagagagagagctcttttaagatgatgcctctctcccagtcagcattctaatcaacccactaaatagaagtgctctcaaattctcaggagaaaaatccccagattacactccttgcaactttagccatctgttccaatacttttcactctgtttctatagctgagcaaaatctgaaaaatcaagtagttcctccttctgtttccagcctgatagaatgttacattgttgcaggtataattcctaccaacaataattacagtatcataaagtaaagttaatcaccactgagacttatttctccagggctggggctatagagctcaacggggtgggactcatagtgtgaacaacacagaaagaaagaaagaaagaaagaaagaaagaaagaaagaaagaaagaaagaaagaaaggaaggaaggaaaaaggaaggaaggaaggaaggagagagggaggcagggaggcaggcagggacggagggatggatggatggatggatggatggatggatggatggaggcaggcaggcaggcaggcaggcataaatatataagggaattatttctccaaagaaaataatcttccaaacatgagcttaaaggttaaaagtgttgtcctgctcctttgtacattagctgctgactccttgccagtttaaaacggtataacgaactaaaatgtaggtattttaggttatctcaatacacacatggccaaaaccctgacaggtatccagacacttctaattgactaatctattcacggttaattctattttgaatttcaaaaatgtgagtgatggctgaacttggaatatgtttttaaatcttaattgctcaaatgcaaatttggaatgagttcactgacagtactcatgagcaatgggtctgagtgtgtaggagcgtcttgccctgaagtctggcatctcaaattaacacagtgctgtgctcgggaagccagcttcttttccagcctatgcttcaggctggtgagaactcttttccatcacccttggtatagccccttggagtcagcaatatcgctcaactgaaaagtattacccagagagaaagttcaattatttctagaaaactactggaaactttaattctcaccaaaagtgagctcctggcatttgtttcctttcttcccactccctttcttttgacagactccccagtctacagaatattttgaataagtagtttatgaaactcaaatttttaaaggcagtttgatatggaagaaatctgatagcacttttgaaagtaacattgtaaaaaaaaacaaggagcattatcgttggcacagtgttgcttggagtttgaaggagacactggatagaggttcactagattctcacggacataatggtaattgccatgcttaggaagccgaattcccctgaactgaagtcaaagtacctgaagggttgtagtcctcctttgtctcttgcagcttctggtacctgctgacattccttggcttgtggctacatcactccagtctctttctctgtggtcacatcacaccccacccttctgcctgttaaatttctctgtctctctctcatgagaatacaaatacatttagggccctctaattgttatggtttgattatggtgtgtggatttagttttatctgttgcagtcatcttgagccatgattgtccctgagtgaccctggtcagttttctccacacagtttgccagcatcctcagacaaaccaaaccatatgggataatatgcttgaagcctttaacataaccccagcataagtcaggtacactctggcttagaagaagtcacttttttccccaaccactttctaagtactctactcactcaaattgtggatctgcttggtttttatggtgccttgtcaggaggtcctcaatgtcttcactctacgtgatcctgggtccttctgcctttgctcttttctaaaaaagttctcaattttcagtataacatttaagatgatttcatgtattatatattacatatatataacatataatataatagtatgatataaaaatgtacataaaacaaacacaaacactggctgcaagtgtggaaagcagagtctgctgctctgttctacttgccatggaaagtggatttttggctgaaatacatatccctgagcaccacagcatcccaccttctgaaatggaagaggaaacacgatgcctcagagtcaggaaggggcttgctgtgaaagccatgcaattaattgcattctgggccataatcatgttctgctttgggcacctgaagatctcttttcctgtcctccacgatgtcacagcagggacagtctctgcctgcagcagctcagatagattaggacgcacagccatgttacatcttagatgtgccatgggcagggtcaggagagaagaggcccggggatctggatgagaagcggttcctgtgctgcccggttgaacttgggcagcaaaaaacaatacaatgaaattctattcagttgtaaagaaaaatggaccctgcaggcgaatggagggactagaaactatatactgagtgagctaacccagccccagaaagccagctgccacgcatttttctcttacaggtggatcctagttctggagttttagatgtgagcatgcaacctgaagcaaccacaaaagccggaaagagtggcaagagagtgggggaggacaagggcgcagacactctgttgaggggtctaaggcgctggtcctatgaatcgggaatgggaaagctggggctttaactgaggagggaagagggagagtgtgctgcactggtggtcttgctcccccacaggagccatagactaacacaaactccagggccaggcctgggacacctcctttggtgttggccaggggtgtctaagtgacccccagacaatatagactattgccagtgtccttggtcacctcccagaacttgaaggtgagaccccactgctggagacaccacacagttgacacagggcttggagacattgagctggaagtgacacaaaagccttctgcctggaggccaagctggcataatacacacaggtgctgtgggagccgccaagggagaaaaacagccaatagtcctgcccagatgtaaagcctatgagtcacaatgatgaccagccaagacatccccagaggtctaatggtggcacttttatttgggagtgaccaacatctgtctaaacaaacttgcagggttcctactgggggatattggggtggggggatgaggagaaaggggaggggagggagggagggagacaagagggagagagagagagagagagagagagagagagagagagagagagagagagagagagagagactagtctgggcatgggcttttgaaacctcaaaacccatctccagcaacacctcctccaacaaatagactaaaaggtaagcagaatcttgagctggcaaaataaaaaattggaagaaatcaagtataatactgtagaactttaatctgtgtaggaggcactaaagatgaaattataccacagaacataatgagtgtgtggtgtggcggtcccagaaaacagcccgggagaggaaacagtgaaaatgagaaggaactggatagaaggcaggtcaaaaaagagaaggcaaccctgtttctgctcccagagagcaacgtgccgggatgaagcactcttgggagtctatttcaaggaaatgagccccatgtatcacttaggagcagggtttagaactgagcatgtgacttccttcaaatcccattgcactttctttgcattgtggcaactgtggtgctttgtctacagttctgctaagagagccaggctagtagtgacaaggtcctgtttcagacacggagcctttctttattcgctgtcatgtgacttcagaagccaacctctgggcctccacttctatagctacccaaagtggtttctcatcttaaagggtgaccaaaattggaacatatatgggagcctctagaaaacgggccctcacttccgtctttatatccctatctggctctcactatttaaagacaaaaatcatgtctattttctttatgcttcttccagcacctagcaattgtaggcactgaggaaatacttatcagccacaattaatctaaaataaaatatagcctgacaatctaaatatacccagatatttacctgagagacaatgggctccacacagactggaagagcagaggtgagcagacacaaaattcacttattattgctatttgtcttcataggaatatataaaaaagacaacggatgccaggccatttttagtatagatggtacattttggtgatttctccgaattctccatcacaatggaaacacttcctctgtaatttgctgttctaaactgtaatgggaaatggtgattcataacagcatgttttcacagggaagaaaccgattcaaaacgacagaagacaatcccagcaattaacccagatgcccaagccaatagtccctgagcacttaagatgactgtaatcagtagaaatgtgtaataatcaggagcccaaacatgttgatttgggaagtttaaaagtccctaagtgtaaatcaagctataaaagtcgatgtccatctagcagaaacctaaccatttctcttagccagctgtgaaatatcaggtttaagccaaaataaaacactagtgttggggggctggggagatggctcagtgaggaaggccccacccacatcagcatgcctggagtttgatcccagcccccatatgcagaggcaggcacggtggtggtgggcgctagggagaaaaaaatgggagaaaccacagtgcattctatcccgtcaacctagcctgatctgtgagccccaggtccccaagagagtctatctcaaaaaaaggtggttcttaagaagtgacactgaggatgacctctggcctacccaggtgttcgctcgtgcgcacacgcacgcacacgcgcacacacacacacacacacacacacacacacacacacagacacacacacacacacaccacacagatttgtgcttgcacacatgcatacacagacagatgttatacaaataaagtattttctgggatttgtctagtaacacactgtggaatttatgaaccccttccattgatgaagatcctgcatagtttgcagatctctgtagagtagggtactgagtaggttattgctttatagtcctggtccccataaaaagcatctgggaaaactaggagtgggggtacatgtctgtaatcccagcactcaaggctgaggcagaggaatggacagattttttagatcaacctggacttcatagcaatttgggatcagcttgagttatatagaataccctgttgaagaaagaaagaaaaggaaagaaggaagggagagagaaaggagggagggagggaagggagggagggagggaggggaggggggagggaggaaggaggagggagggagggagggaaagaatgaaagaagagggaaggagaggagaggggtcagcaaaggaaagaaaagaaagcgcctcgggaattttctaaaatgcaagctttgcccatgttgtggagtgcctgcctagaaaaaagccccaggcctggtcacttggatcacaaacacacaaattttatagaatttgtattcttggtagcaaagtaggtttgcagaatgattcttgctagaagggagagagggggaaaggaagaaggagggggaagagagagggggggcataaggggagggatggggaccaggaagaggacggggagagagaacccttcaggtgattctgatcacatttcagtctggtaatgacacaaaggtttgtaccaacaggaaatctgcaggctggtgatgcgaggagattatgaaattaaggtctctgtgtgtttgtgtgaatgcagatgtggaggccagggtatatataaccttgggtgcctcaagcaccgtctgctggtttgtagagacatggtctcttactgggtctgaagctcaccaactgggctaccccagggatccacctgcctcccccctgcatcagggctaacaagtgtatgccatcatgcccaactcttagtatgtaggttctgggtgtgagggggttcagctccagccctaatgcttgcataacaagaatttcaccaacagagctatcatcagctaggcccgtacagccacggagtggagatgactgcatggccacaccagaaagccgctatctggtgccactgagagcccttggacttgtccttctcctttacagtttgtggttttaacaggaatggcagaagccacttggactataaaatgctgccctgcccttggatgtaaatgtaaccttgaggcgggagaagggaaaagacaggatgattaacggatccaaggcaaatagtggtcctggggctgcacagaattacaaggccaaggttgtcctaacttgatatcggggcaagaaacaggaaggtcctgcagctcctctgctgggctaagggggctctcctgaggtactttctacacatcaaacagcacacactgaaccaactgaaggcactctctgaagctgtgtgtccagcaaacaggtgaggcaaacacaatttcttgatcacagggacacacacgacaatcccagcatttgggaggtgaggcaggaggatcaggagtttcaagggtacccttaactacacagcaagtttgaggtgtccgtcactacaggaaatactggctcaaaaaaaaattaaaaaaagctcttctcgctgtctcatgaaattgataagattttgtaaacttgaatcataatttgaggatcccgtccccccaaaaaacatgtattcttgataggattggtatcagctcagaacaccccaagaccaggtcctgagcaaaaggagatttatttgccccagagggacaaagcacagtgaataagaggcaaagaaagagatagaggatggggagaaggggaagggaacagggacagagcgggaaggggcatttgttccagatgtgtcaaaggactgcctgcctctgggtagagaggagacagatgtggccataggaaactaatggtttataagggtgaaaggggaaaccccatgttaggatgaggtgtttcattttaattgggcaggttagttaggtgaaccaaagagggcttttgattgctggacttcaatactttgatagctggaccttggtagtcaggaggaggaagtggccaaataaggggatagaccctggtgtctagctatagggattcgatctaatagtttttaacaaggcagagggaataggagagatggctcggtgatttagggcactaggttctcttccagaggacccaggctcaattcccagcacccacatttcagctatcaaccatttgtaactccggttatggggatccagtctcctcttttgtcctccatgggcaccaggcatgcatggtacacagacaagcagacaaaacacccacacacatacattaattatgttagaaatgtaaatcagggttctagatgttcaaaagcttggcatgttcttggactcttgttgggtcacatggtatggtactggcttgctagaaaatattgaatattgagattggagcaaaacagaaagaaaagcccacaacggcacataggggtaccaccaggaatgccgcagttcatctggaaaccctttaagactctgtaagcctctacagaagcaggccaggggggtctgcaatctgcaatgcatcactaatagaggacattctattttttaaaaggaatgaaattgtatcgtttttaggaaaacagatggaacaggagatgatcatgttaactgaaaaaagccaaactcagaaatataaagataacatacattccttcatctgtggacgctagatttaaatataggcataacatgaaagccacaaagatggtagtggggggtaagagaagagagaggcaggagaaaatggaaagaaaatggaaaaagggaaccccaagtatttctctcatattcagggtttagatttagtgctctctctctctctctctctctctctctctctctctctgtgtgtgtgtgtgtgtgtgtgtgtgtgtgtgtgtgaaaatgtcaagttgaaacccactatttcatagtaataaaaacattaataacaacaaaaccaagatggttttgagaatcagagtgtctggctggggtgtggtcccatccatcatgtctcactccaatctctcctgcaaaggtgtctggcaagttgtaacactcctggaagaccacatcttcctctggctgtcaccaggattcaggctgttccttctcccagcatgagattgttgggggccattgtcccaatagtcagagagccaaaaggggcggggcacagggcttctcagaacattgccatcctcagatacccagacacagcaatggctgcagaggacatgctttccttcctctgctcatgctgagtagagtccctgttgccgtttctgtaactagcagttactgagctgatggacttccatgagctgtggttggcaaagcataatttgctcagtggcctgccagatgtccaccagccctgacagttctgaaaactgtgatttttattaaactttgggaaaaaagcagtttcacacagacccttctgcatcctttcttttataaagctcataatcatgcttgctgggtgaggcaggtttaaggcaacacccccccccaccccccacccccgcatcttctgggttggcaccttcttgatttaacttcctcaacttaaaagcactggtatcccatgactgatggatgctgcaaatagggcacacgtccgatttgtggggtcagtaacaaccccactccctggctacacatgccccaccagccctgctgttagagtggccataaaggcccagtaagaaaactcctagcagtcaagagaatcaaatctctggcctgggtggagtcctaatgttacagatcggctggtatacatctggcccagagaccatcccaggaaggcaggctcaccttaagccacactaaagatataggttgaataattgttcctttaatgaaatgctacacctgccctttccagaattctcactgcccagaacaatccgtgtgagatgctctgaggttttgctggctctgcccatctttctggggtctgaatgacaaaggcacaactttttctttttgctttcttctttctgtctctttttttctgattttagccagaactaagtatcctttctctgataacctgggttcccctcctccatctgtctccctatccccctgccatgtagatgcttgtcccttgtgtgtctgctgcccaacaagctggcttaaatggatggcttttcccttctctcctccatttccttcctctgagcagttgctgagatttacaatttgcttctccctctaagatcagctttggaaagcaccaacacctggtcccgcccctggagttcctctctcaggtacagctgaggcattagaacttttcagaactttctgggtgattctaacctacagcagggttcaaagacagacagctgtagaattgggaccctctgggtgaaaaacagagaaaatgacctcgtatgggtctccagggggagatcccctgccagggctctggccaagcacagagctcctcagaggaggaatccctggaggtgaagctcagcttagatgaagcagcaggagtcctggagcccagatccatgagcccagaatctgtgttcatgccgactatgcctaggaagccacagtggtaatggttatgatcatctttgtttttagaagataaaatgctgttctctagagagagtgccaactcagtaaaaatgccagcagcaaagctctagccgtgaagactataaatccagagacagctggaaactttatctccatggtttttcaaaactgcataacacttgcaaaatctgaaatgattcccaagaagcacatacatttaattacttgaattaaatctggctgctcataccgattcctttaaagaggggaagcaaaacagaaagcatgcattgttaccaaaccccaggtcacagggcctacctctgggtccaaatgcttgcctacattaagcaaaagagacatactatatagattttaaaaatgaatttatttacaaatttgatcaaaactagagaaagagacatcctcagcctgtctcagccttacctagcagtgttaacaacatatagagaagatggaacagacaggaagtatgcatatgtgagcttacccgtgtctctgtttccctaactgggagatggtctttctcttggatcatgccatttccatatccagcatggtatttcttataaaaactccatgtcccagggctcccgcaacaataggaagaaatattgagacagacagacatagtggtacacacacctttgatcccagcactttgaggaaaagacagatagatcaaggcagcctgggctacattgcaagtacatgtttgtttcaagaaatgaaagcaaaatagtatcctcaaatttcccttgcagcactgacggtaggctatacaaggatttcattacccttcaagacacttgctcagagacagagaaaaaggaaaaagaaaacaaaggcattttgttttgattttgtgttttagtgagataatttcctgtgctttttaatgtcttttataggtcatttggttacttcagaaaactaagccttactgttaaagtgtttttttttttttttacaatggtatgaactttttttatttgccttgttttataaagactaatgtcctctcctgagtgttatgccttttgatgttttaaaataaactttcccgaatcagagtctgaattgtgtcttttggacttaaaactaacttcaggatatcacagaggtcccctgaaacaatgaagagacctgacaaagaggaacattaagctaactggtgttggcacactaaagttacttgtgggatgcattgccaagcaggaaacgcccgtaaccattgcttgcatttgtatgccaccaagctgtgccctacagatcatgtgactcaagctcctagacatttgacagagtctctgtctcagcctgtgcaattctgttaacattctgtgtgacacagaaatggccaaatttcctgattaattgctgatgacaatgaactcaccagatgtttaatcgtgatcatttaaaatctttgcatccggcaacagctcctgctttgctctgatgtttttgtaagaacgtcctcaggtaagtcatcattccagtgttctcagaatcaaaggtattcacaaggaagactctgacacgacagggtggtggtgacaatgaagagcgagccactggactgtgtgggaaattaggagggtctgatcggttcacaagctgctgactgacaggtcccactgtggggttcaaggggaacactgaggtgggttgttgctgggcaagaagtttcctaggagagttattgcaatggacagacagaaaggcaggcaggcagacatcatggcaaggtgtcatggaagattattttaaggtgtgttacttttgtttctgctctggatcatttgtttaatgatgtaaagaagtgttgcttttgtttatgctgcatttgtttacttctgtgaagctgtgattcttcgcctgtctgaatcacctgatggtgtaacaaagtgatgaacggtcaatagtgaggcaggagaaaggatgggtggggctggcaggcagagaggaataggagaaatctgggaaaggagggacaaggagaggaggactccagaggccacgcacacggccacacagccacacgaccacacggccacacggccacacggccacacggccacacggccacacggccacacggccacacggccacacagcgacaaaggaagaatgaaagtaagatttacagaaatagagaaaggtaaaaggccagaagcaaaaggaggaagacaggagaatttaagttaagaaaagctggcaagaaataagctaaggtcgggcatttataagtaataaaaagcctctatgtatatttatttgggagctgggtggtgggcccccgaagagaaaagaggcaaaagagtaaagaaaacaaataacaacagcaggatctgcgaggagaattcagacatcagtaccgcagtataaaaccaatgtggcagcagatggcagggaaggtgtgtgtgtgtgtgtgtgtgtgtgtgtgtgtgtgtgtgtgtgtgtgtgtgtgtgattattacagtggcttacagggtatggtccaggcagtccaacaattgctgtattcagttcatcaccagacacctgcccagctatgttgggagcacagatgtccttgtcctcacacataagcgctagagaaaccaggaatgccaaacatgcaaggttgtctcttcagagagatacagcaggctggaaacagagatggttgaccatctaggtgacctctatgctatctgtatgaccacatcagatcctcccctaggctgtaaagataacacctgtagtctgtctctagaatccatcttcatggaagaagtgacatatgctttgagaagagtttccatgtaaccgtgctttactgtgcacacgggattatgttacactaggaacccttttcccaattgtactgtatgtaaatgagcctaaaataaactttctgcttttctgaattactcagaaagtgtggcttttccttttcttctttgcacctcttttctttttttttcttttcaaaaatttaaattagaaacaagcttgttttacatgccaatcccagttctctctccctcccctcctcccctgccccctaccaactccctatcccattccctttctgctccccacggagggtgaggccttccctgggggggaaatcttcaaagtctgtcgtatcatttggagcagggcctagaccctcccctgtgtgtctaggctgagagagtatccctctatgtggagtgggcccccaaagtccattcctatcctagggataaatactgatccactgccagaggcctcataaattgcccagacctccaaactgacatccttgttcagggggtctgggtcagtcctatgctggtttcctgactactagtctggggttcatgactcccccttgttcaggtcagctgtttctgtgggtttctccagcctggtcttaacccttttgctcatcactcctcctctctgcaactggattccagagttcagctcagtgttttcctgtgggtgtctgcttctgcttccatcagctactggatgaaggctctaggatggcatataaggtagtcatcaatctcattattggagaagggcatttaaggtagcttcttcattattacttagattgttagttggtgtcatccttgtagatctctggaaatttccctagtgccagatttctctttaaacctataatggctccctctattacggtgtctcttttcttgctctcctctattcttcccctgactcaaccttcctgctccctcatgtcctcctcacccctccgcttctccccttctctttctcctaactccctctcccccctccatgctcccaattagctcaggagatattgtgcctttccccttctctggaggaccatgcatgtctctcatagggccctccttgtttcctggcttctctggtggtgtggattataggctgctctatgtctaaaatccatatatgagtgagtacataccatgtttgtctttttgtgactgggttacctcactcaggatggctttttctagttccatccatttgcctgagaatttcaagattccattgcctccccccagctgaatagtactccattgtgtaaatgtaccacattttctccatccattcttcagctgaggggcatctaggctgcttccaggctctggctattacaaacaatgctgcgatgaacatggttgaacacatgtccttgttgtatgaattgcacctcttttctaactatgcttcccctaacacttggaccttcacactctccaaagcactccccccaccacgtggctgcttgtccactgtgtatcacctccacagcacagctttctctcttggatgtctcccttctccaggcagctgccaagttttacagagggcttttatattatagcaatctaattattcacatatcatcaataaaaactctttataaaagggcacagctagaaatgctggatttatagcaaggcttttaatgaaattcattcatttacttttgttgctgttgttgagacaggacaggctctcatcacatagtataggggtccccctaacttgccaccctcctgattgcctccaaagtgcctggtggaatacctatcttaatgagtagttttaaggaattttgaaacataaaacctccttcagaaaaatggcctggaaccttgactacatggctccattataatcttcccaggcttgcagcagattttttaaaaagtcagtttttgcaaggtccaggaactgaagacatggacctctatgacatacctagaagtgtgaagggtttccttaaactcaggcttccctaaaaatgctctcatccacttgctttttgtgagttatgagccattatttattcataacccatttacagttgcctttatggggcaaaatgaaccacttgccaaagtaacggatattttcatagacttagaacaaatgctcccagcttgttcctttgtaaatggccaatggacgggattcctgtcttcttgttctatctgcccaagtctctatgcttgccgtgggccctgtttaggtctgtttttctagcccacactagaaatcaaactgacccacccagaaagttgaagtctctctgtaacaggtgggggatcttagaccacaaagcatccttgcaatgatgaacacagcctgaactgcagtcattgtctgtctttcactgggttacacttaggcatgtaatccagcagccaagaaggcagcagggggcaaccatccatttatccagtttactcccaattattcagttccagttatttggcctggggaaggggctgtttgctactcgttgtgaaagaaaaagcaccacaaaaggaaaaataaccactaactgatttgattcactatcgatgtcagtgttagtgaatatgttactgtatacatatggcagcacacagatcgttcactggttgtttagataattttgtttgtttgtttgtgttcagatgagggtctatctgagttgctggcctcgaactctcagactcaagctgttcccctggctctgtctcccaggcagatgggattataggcgcattacccatcttgctcattggtatcattcataatatgaactaaacagtgtggaagtggcccccacttacccaatgtgtactttaaattttgctgaatgttgtcatgttaaagcctcaaatcctccaaatgacagccgtgcatgtcattttaaagcattattttaatttacttgttgcaatttctatacataaacataatgcagtcagcgctggggacaggacccaagccccacactccaccactatggaaatcagtgtggctgctgtgtaaaaaactagaattagagttaccatctgacccagctgtactgctctgggcacatacccaacaggctatctcctgctatagaaacacctgctcgtctaggttcatggctgctctctgttcacaatagacaggacgtggaaacagcctagacattcgtctactgagaaatgaataatgagcatgtgataaatttgcacaatggaatattattcagccattaagagatttggaaccctcagtcctaaatggattgtctctatcaaatctttcccttcagagctcagggaacccttcagaagaggaagtggaaagattctaagtgccagcggggatggcagacttcaaggaaacaaggccctctagatgcagcagggctgatgcatacatgaactcacagggactgaggaagcgttgacagggcctgctcaggcctaagacaaatgaggtcccagacagagagggaaagtggacacaagaccccatccctaacccaaaagctgcctctaactgacaactgcttggaaaaactagttgtctccaacggagtctcactgggtatacaaaccagtcttaggggtaggctccatgtccagcaggccaatacaaaatgaactcaatggtaattttggagagctttgggtgggctgtttttttaatttttgttttggggtttttgtctcatgttttgtctgggaattttttcaaccttacaggccttttgtttatagattatggtttcctattttgtatttttatgggacttcagtgtgtgcaaatgtgcctgtctctgtgtctggatgtgtttcttatgctttttctttggctcttttttaaatttgtttgttttatcctattctgtttttgttgttttgtttttaatctttttttattatttttagatgtctatttgttttctaatgagagagagaaagagtgtagattttttgtgggtggggaggatctggaaggagttgggggaagggaaatcatgattggaatatgttgtttgaaaaaaatccgttttcaataaaacacaaaggaagcaaagtagccttggaagtggctcttctgaggcctgtaacagtcacactttgagcttggagtggctcctgggtcctgctgaacatcgatgacagcagccccgctgctagctcgacaagctacaaaagctatgaaacgctgggtgttttaaactgctaagttttagggcaatttacagaaaccaaatgtttctctccttccttccactatcccagctctcccaaatgctttcttttcttctctctctctgggggtgtggcagcctaagtatgttgttagatggctttacacacatccctctccccctctctctctctctctctctctctctctctctctctctctctctgggggtgtggtggtctaagcctgctgtcagatggctttacacacatctcactctatgtgagtatcattcccactggcacaaagaggctgaagttacagcaggacctcagaggacatcagtcatcctggaagtctcctggtgcctgtctggtctcaaagcaggtgtcttgctaagatgtggctcagtgaaagagcactcacctagcatgtcgggtcctagaagccatcttcccacacaaaaccaaaccgcaagccaaagtgcagtgtggtggctggtgagatgactcagcagtggacctctgcccttagctggggagctattgatagttgctggctgctgggggatggggagtcagttttctttaagggtgtgcccccctaagccaagccacaactcaatggatagcctcacacccaacctagattgccatattggcagtgtcctaaggccgaggctacagtttagatttaattacgactgcattttactctttggggacctgttaatcagctttagctgtggtggctgaccatcctcaaattctaatggatttcaacctcagacatttctccttcccatgtaacccaaggccagtagtttggctgtagctgcccttgctgggctccgctgaccttggctatcagctgagtggttgggctaactgcgacttggtttagctctgtgtaacttcttgttcatctcctagggcaaagaagcagccactgtctgagacagggtattgctctaatggtggacaaaacctcaacagaagacccactcacatacatgggaacctacttctggagtgcagtggacaatctactggctaccgagggccacatggtcatgcagtgtcattcagtgatggggaagtgcttctgtgtatgtgtttgtcttattagatgattaataaagtactgtttggccaacgaggcagcaagttagatgggactaggagtcaaggaggattctgggaaatgtagtaaagaagtggtgatccaggcaggaagtgacatagcagggagactcatatataagcaagggcaagaaggaagtctaccccttctctcttcctcctggtctctgctctggagtcgccatgtgatccaccagcaagagagggtgccagtgaaaggcgtcctctataagtcttataaaatatatagatttatgataattaaggctgaattggcatataagaaatcctaatcattggccaagcagcattagtacctaatagaagtctctgtgtgttacttgggaccttgacgtggagacagtcagaactcgggtggcctggcagaaagcacccacgtggtggcagggctcaggtggcttggtggaaagacttattgttacaattcagcatttccttcagcaagaaatcagtaagttggtaacttccaactaataatgcaaacatcctcaagaacccatggagggatgtagatgactgtatggaactaacagagaaatctagaaacaaatctaaatgtttatcaggtgaaatgggtaaaacacacacacacacacacacacacacacacacacacacacacacacagtagagccatacagtgaactgcgaccaatagttgtaaagggaatgggcttcattcatgaccatctaactgggcgaccacagggctcaactcaaaactatactgtagagtgaaggaatcatgttgtctgttttgttggtcactgtaacatttcagtaacctataaatggagagtcaggaacaggatggggaagggagggaggaaaacagagagaggaggggtattgaatgaacttctcaaggtatttttgttttgttttgagatagtctcgctttgttgcccatcctagcccagaactgtctatcttgccgcctcagctttctgagtgctaggattacaggcacacgccgccgtgcctggtttacaatgtcattttaaaaagacaattcagccaacatgcaaagccccccatggcaaaaataaatgaaaccctcttgatgctacctctttgggaccacaaagtccctcacaggtgagcaggtgttagagacttggccttgccgggtcacagagaccctgtctgttgctgtgttcgcctttcccttttctttttacacctgactttcatttcagtagttggcagaagtcatgattctgaagagagttctgagccttcccagttctcaaagccaccacagtgacagctggacagtgtatccattcagggatgcagaggcccagagtcaggcatccttaaaccatacacctctgcgtttctttctggggtgcagagaccccattttctacataagctttgacagctggggctccctgcagcgtataaccaagtgctcacagagaacagagaatgacaagctcaggactcatcagccggatcctcccagatgactaagggcttaaagggggtaaatggttaaggaattactgaaggagtccctcgaccttacgtcacagcacatgagacgttatatcaaagccagagttgatttgcttatgtggggacgatgacatctgttcagaggactgctctgccagggccatcaccatggctgcaaatgttccagggtcactcagctggggagttcgcaaagacaaggaaagtacaaacgagaaaccttgaagtcactctctggaaatgagccccatgccgtgtcctaagagtaaacatgacatggctagcaaatggaccaggaagccctgagaaaaagcagctggcatggctgttctgccacctgccaaagtctggagtcccctcatttgtcagcccagttccctggctgtcccctctttgctgctctggtggctaactaggctgcccctcctcacacagtcctttagattcagctgttctgtttctgtcccttgttctactggaaaagcagtgcccttctgcagtgctggaactggcacggggaggttcctgatgcatgaacaaagtcgctaagatttctggccttgaacattgccttctgcattacttaacccccttctcctatggcagcacagtggtccagcaacagagcatgccggaagctgggaggaaaagcaagccagacatagccttctgactcaccaacagcagtgaccgtaaggacatcctgagcctgacagccgaggtcaccattctaaggacggaaaagtaaacgccaactttagagaggaagctgcgtgtcaggtgtggagagccttcctcagcgccgggttcagcctctggctgtggatagacccaactctttcgccagccatcaggagaaaagaagtggcttctacagttgtccacgtgtaatctcacagtgttgatacgctcatcaaacccaccactactttggtttttgtcttcaaagaggagccaaatggacttgctcctgctgtaataaagggctccccttcccaagggcaaaagcagagctgctggacagggtggccatgcggaggtgaggcagtggggagggacagaggggaggtggtaggagctgagggttaaatgtgattattttctctaaatccaggctgagatttggagccatcagggttgctgggagatggagctctagccccaggagggtaataagagggattaatgcctgaggtggtgggccgcctgctactgcaacaagaggatcaatttatccttaacagcaaaggtcagtttggactctcagtctgggatcacttggttccactgttttggggactggggtgggatggcacaccgagctgggaacatgtagtgtttaaacatgtagtgtttgccccaggacagccaggaagtaaaaacaggagaggcagggctgtggtctccaagtccccttcagagacatggccctggtgatctaacttcctcccactaggctccacctcctcaagcatctactgtcttcagtaccatcatagctgatggccaaggcttagcacacgagtcactgggacatttacaatataaacagtaggaatgtgtttctgtcaggagtgggtttgctcctgtgagcataaagcgagaccatgcttcatgcctgacctgcctcgcatgtgccggctggcctttccactgtctgccatgttgaaacgtctcgaggcctgtgtcagtgctgtgcatagacatcccgacctccagaaccatgaatcaaaacaaacccccgttcttcgtaagtcccacaggctggggtcgtctcgtacagcactagagaatagactgagacagcaggttaagagaaagtcacagggcattgcctcatgtgcccttcgtcccttccatctcagcttccaaactccagccatttccaaaactacctttcacaactttggctttggggctgcttatcagttgccacaggtccttggtaatcaggagagcagttttcccctgagttataataacaaattcaagagagaaaaacactttttttaggaacataaaatccaccccaccctctataagataaaccgtgactgtgcacctctctgggtgactctgacaatggtatttgttacctgacagctgcatacaacgcacagacaactctcaggctgtggttgtggaccaaagaagctgtctgtgaagaccgtagttctacacttaaatgcccacaaagcagctgtcatcgctgaacagtgtgcgattcttggtggcatttggtgagtgacaacaaaagaacttggtactggatgtactactgacgtcatggggataattataccaaccaacagctgctggaatttatttttaacataaatctcagtgatatacatatgaaaacctgcaagaaagggaaggagaagaggcgtgtttaagtgactcctgtcagctggaagtttatgctttgaaggtcactgatggccacggtccacatcctcgcacctgagaatccccaactctctgggaagctggagacccttgcttgccctccttccatgccattctcctcctgccgctactctagcatattctttccctggttctcctcctgtctgtctcttacctcctgctctcagacaaggtgagggcttaattatgaaagtagactcagtcagaaacacttgacccgagtctcagcctgactgctctttgaggaacactgggacatatcaccccattgttaaataccaatgttcctgtccaaacagccaaagagacaactgtgcagtagaaaccctactcagccagagtcactcttcacacagtgccaaaagactccatttcaaccctgagaatattgtcaaccccagatttcctttaatttggtcatcctctctggcacactcactcctgtaaagcaggtgaggtgaggcacagcttcgttttatttacactgctttgttttcgtttaccaagcacttaactctgcctagaggaaacagccaatgaatacagcaagcagtagcctactatcacacatacaggtttgtctcatctttctcattcctcctgtgcagcgtggcttttgcactcagatcacacgtctgttccaggaaggatgtcatggatacatactactgagcaaacgggtctcccaaacaccaattagtgtgttgcccagataatttgggagtgagtgtgtggttggtgtgtgtgtgtgtgtgtgtgtgtgtgtgtgtgtgtgtctgtctgtctgtctgtctgtctgtctgtctgtctgtctgttcctggggtcattttcactcaggtttgctgttctagtttcacttttattgctgtgataaaacaccctaggtgacttgggggagaaggaatttttatttcagctcataattctatagtccattattgtgggaaaatcaaggcagggacttcaaaggagctcccgcctcacgcccatagtcaagagcatagaggaatggatgtatgcatggtagctagctcacttgcctgcttgtgtttagctcagtttctccactattaaaacagttcaggacctcctgcctagtgccaccaacagtgggccgggtcttcccacatcaattaatctgagacaatcccccacagacttgcttacaggccagaccaatgtagacaaccctcaaggagactctctcttcttaggtgagtttagactacattgagttgaaaataaaaactaaccagcaaatctgcctcttgtatcacacctacataaggattccttggcattactcttttatcatctagaaatccacttaagattactgacatacgagtggaacacgcctttaagccaagcactagagagagaggcagaggcagggagatttctgtgggctctgtgggtttgagattttcttggtctatgtaatgagacaacctgtctaaaagattaaaaaaagaataatcccaactatatatcttatctatcaaaacatccactcttcctcagaaacccacagtgagtcacatgtctatacccaatcctcccccccaacccctgagcacaagctcctctaatcactgtcctcctgggtaggagcagctctcacaggtgctaataacttactgctcggctactgcggtggtacggttggtgccaccccgaattttcctgtgtgttctcagctcttcaaaggcagcccattgatgatagcttcctccccatgggtaaggaagccaaggtcagggacgctaagtgccatgtacacaaggacacagagtgggaatatcaggctggtctctgtgccccaaaccgttctgtagcaataatagtcttatcacagtgcgagttcacagcaaatgtcaatgaatacatgtgtatttaatatttgcatttccagacaacatcccatcacttctcaatagtgccatcctgggagtcaaatgtgcaaatacatgggcttcagggactgtttggggttattttgatcacactctgacactccagagactgccagtaaagttctccttgagtcagagggccgagtaagccactagctgaccagaattagccattgaggttttggaggacccaggacatatagagagacacaggaagtagtagggaggggcttagaaagatttgcagcccttttggatcaaggaaggagagtgagagagaaggtctttggtcatttctctaccacttctctgatcaatcaggtttttatccctgatatctgactcccgaattttatttaatatagagcaatataagtaatcgaatcatctggtgtccaacttggggcatgagatcacaaggcagctgcttgctgctagctttacagtcacccgagtggccacttgcagccagctctgtcattcaggcagcctggcgcccttgcttcctgccatgcgggtctctcctgacccttcccttgtgtccgcttttcgggcagcgctccctctcacttcaggttgcaggcttttcctggacccccacctctggctactacctcaccaggtcagtctgcttgacacctgcttgcacctatttgggcgtttactgccacctctgtacaacctcagcccccagctataccccccaggcagctgcagctgccctgggcccggctgggcgccatgtgtccagcccttgagatgcagcaacagccagcctcagcctcaccacccccatacagacacagcggagcaccgctgcggcagctggctaccctcgcacagctcatcttcactctcattgtcagcagacctggtaaggcacctgggaattctcaagggggggattaggttgtttttctttctcaatgcctttcccacactaagaatgggaaacaatattaaggtgtaaggagttaggactctgtatatggtttcatgatggatggatggatgaaaatggaaaaattcaatgaagggataaacaatttagctgtgattgatataaggttgattataattgtaattagtttggtgtttcatgttttatccttttaaaaaagtagtttgatatctgtgtcaaatatgaaaaattgattgatgagatacaatccttaaaaagacctactaatgaaactaaaaaaaaaattcacacacagataggggaatttagggcagaacctactgtgctttgcattatgaaaactggagaggagtgacccaaggttattagggaaccaaccttaacttattcagttaccatataagaacaaccaccagatgatagatacccccaaagctatgcagaagttaactgagatgctgtagaaatgttatatttgaagagatttaaggaagcagaagtttcatatggtaggcattcaccttttgtgaagcaaatgccaaattcataggcaatttgggacagaattattccacaagactggaaagatttagctatagcaatattagatgctggccctcagttacaatggaaaatatgagaggaagctaggatcctagcacaatgaagtagggccaggggtattgaaatttcccaaggtcagcttctcagtgaaggccaatgtgctgatttgcaaagacagtttagatgtggccctatgccctactgcagctttgaatgcttgggacagggttgaagaatcaagaaagaggactgagtcatttactaaaattatacaacttttttttaaaaaagaaagattaacttcagctgtaaatagaaggatatcagatccacaaattagataactatttattgaatctttggcttttgaaaattctaattcagaatacaaaagggtgattagacctttaaaggcaagatcagttcccatagataaatggattagaaatacagctgacattgtatctcacacttacaatgaaacttggatgagagaattgatttctaaaaattttaagaaaaatcaaaaggttatatgttttaattgtggtaaaccaggtgatctaaaaagggattgcaggcaaggtgtccctagaaacatttttttttctagagatactccaaatggaaggcccctgcctcccagagtatgcagaagttgtggcaaaggacagcactggattagtgaattcagatcaatgtgaaataggcaaggtaaccctttgccactgggaaatgccttcatgggactctctcaggccctgaagtcaaatatgattcaatcatttcctgtcagcactggggaaactcctctgtagagcaattaaaagacgtaatccctgttgttaaaagccacactgtggggctggagagatggctcagaggttaagagcacctactgctcttccagttcaattcccagcaatcatatggtggctcacaatctcattcgttatgagatctggtgccctcttctaatgtgcagatatacatggaagcagaatgttgtatacataataaattaattaattaattaattaaatctttaaataaataataaaaataaataaagaaaaaagccacactgctctggatgatcgaacagcttcagtagataaaacaaaattttcaggagagacaataaaacaagtattttggcaaacttctataaatgatcaaagaccaaagctaaaaatacaaataaatggcattgtgattgaaggtttactagacacaggtgcagatgtaacaataatttcactaaagtcttgacatccagattggctcctttagtaggtaaatattcagcttctaggaattggaactttgtttcaggtaaaacaaagtgtaaggtgggtcaagtgtatagggccagaaggacagagaggaaaattaaaaccatgtgtggctgacatagcaatgagtttatggggatgtgatttattacggcaatggaaaacacagattaacagtcctccaatctcagaaacaaaccataaactaaaggatgcttctgagaaaaatactaaaactttatcaagaacagtcacaggctgtttaggttatacataagcagggtataacagatgctgctatttcaaaggaaccaacagccctacctttaaaatggctaactgacaaacttgtgtgggtggaacagtgcctgtgacatcaaaaacttataagtactagaacagctggtataggagcagctaatgttcaacatattgaagaattgacaactccttggaattctcttatatttgtcattaaaaagtgattcagccaatgggctctttacagcttggaattatcttgccttctctattacctaaaggatggtctgttgatttaaatgactgcctttttactatacttttacaaaaacaggatagagaaaaaaattgccttcacagtgcatacttttaataattcccagcctattaaaaggaatcaatggaaagctcttctacaagagatgctaaacaggtctaccttatgttaatatttagtaaaacagctgttaaaaataatttgtaagcagtttcctcattttataatttaccattgtatgtatgatatcttattagccaatttaaactcagagacctctctgggaatgcaatgtccaatctagcatcaaaactccagactcccattcccagtttgttcattctgggcctccctcagtagtagacttctgtttgctaattctctactgcagagaacatggagttagcctggcctagctgtcttaaggggcatgtgtcaagttatagtctatcataggatttttactgctgtgaagagacaccatgaccatgacagctcttataacaaaaatatttatttggggtgtctcgcttacagtttcagagattcagtccattatcatcataatggggagcaaggctgtgtgcaggcaggtgtagtgctggagctgagagtcctacatcttgccagtaacaggaagtcaactgagacaatgggcagtatcctgatcataggaaacatcaaatcccacccacacagtgactcacttcctccaacaatgccatagccactccaacaaacccactcctccgaatagtgccactccctaagagattatgtggaccaatgacattcaaactaccacagagttcatggcccatgggacacaatgtgccttccagcccctgagagacccatgcacttcttaggcagtaaagcattcaggccactttgtgtttctctgtatgttcccttagtagtcaaggaagtatggaagtgtgacaggacaattggtcttagaccttaatcttgtgtgacctgtatagtttgcaaacttcatcgtatgttggcaatgacaacagtattgatcctggcatttgccattataatctgtatttgattataaaaagcctggttgctctcaataaaattgttacagcctcagtcttgctttggcccctgccacccaagctggtttcattccacatagccgtatcaggtgatcttggcccagtaagtaatggcagatgcttccactcgaccccaccatggcctttccatgtttccatctggagcagaggcaagagacagagaaagcccctggagtgtggctgcttttaagaacttctcacatttttctgagtgcagtgagtcccccattgactgtgtgctggagccttgcctcccactccactctctgctgtcctaccctcttcctgccacaggggctctacatgaagctcatcaatgtagaattgccaagccccttctctctatggtgaaggaaagccccctcaccaccatggcttctctggtttgggcagatgtgatacccagtaccccagtatagttctccatgtccttcacgtagcagtactggggctcaaacccagggccctatgcatagcaagtacacaatacccatcccaatttgttcattctgagcctcactgcaccttagtccttcagactggccttttcttagtagcaggtaagcggctggtgcaccagtcacagctgctccctgaccctgatgtttagaacggtgcacactgttcttgaaccctagagactctgtgaaagcctgaggacatgggacaagccaagttcagcaccccagtcacctcacgtgacacaaaggagacccttgttagaacaagcaatgcacgggtccagaagcgagggagacaaagtggcccttgagggaaacgagagtgttgtttacagggtatcatctaatgcttgcccaggcccttggaggagtgtggcctatgctaactctgggcaccccatctttctacacaacaggaaagtgaccttaatcatctgcaagaacgctgggtggctcttggggtgcttcctatagagggatccataacacagagggaaagagcaaagactgcccaggagagccacagatggaagcccctgtctctccagcacacagagtgtccatggtgcctttaggaaagtgactgtgaatctcctctgcctgctttatctcagagctacttgacatcctagaaaacaccttgcagataccaaactcttttgcccccattccagggccctaagctgagttatttaccaacttctgaatagggacccgcccctcccccaaactgcttctcagcccaggggctaaacttatctcctcagggcacagtgtgtggaaagagggggtacctctcacccaatcactctccttcagtgtttgccgtctcttatcagagcccagtttacacctcaactttgaatcccatcttgtccctcagcagtcgcccctcacccagtggtgagaaagaggttcgtggccttgcagttggtacttgtggacactaggtggcgatattgcaataggaagatgaagcgcggatgcgttcctctgacaaactaacccttagatgaagaaattggcctataaaccagaccaacaaggccagcagcaggaaggcatgttaatgtagaaccgaataagcagatgacatccgtccgtccgtccgtgttagagagctgcttgtaattgtttatttttgatctcctgcaaagagcaatcccgtcaccgtcagttttcccagggaaaaacccaaatccaaggaattgaagtcatgtattgaaactccttatgtcatattcatgttgaaactgtgtatgtcttgaaatcacttttttcgcactctctgatacctatggtataattacctcttgagacaataggtctatcccacaacacagtgaccaagattagcaatggtgcgatgtcacttgcaaattgctgggggaatagacctttagggactctcaccaggaaaatgagcatggggtagatatattaattggctagacctggccatttcataacgtagtgttgcacacaattaatacctgtaattatttgtcagtcaaaagtaataaacagaaaagaagactacaaaggtaacagtgggccagaatggacatattggcctgcatttctaggaagagtgtagatgggaccttatggccagcaccggcaaacagttctaagcacctactatgtgtatgtgatgctttgaactcaaaactcctgcaagcctggggaaaggcctgctttctcacactgggatcttcagatgagcacacagagacctgagagggagaaacagtgcaacattgagactggggatcgatctgaggaggccgaggccagagctgggccttgttcactgcccatccactgtgttgtgcaagtaggaccactcctgagagctggcttgggggccctgggcttccctcttgtaagtactctcattgaatttgggggtctcctcttctccctgacccttgtgtgcacctgaacttccctatcaagacaacccagaacaagagggactttgccaccagcccggcacaacccagccacaagtctgtcctctgaacccaagtcatgaaacagtatcaactcatggtcttttcttcaaatgtttatctccccaacatgcagacacgagtaactgtgctgttctctgagctctctcatggtgcagccggagatggaagactttctggcctatgctgagagagcccatgaggccacgtggaggagacactgccaacatattgctgcctcccagctacccttctttggttggagcccaagggatggccaaagatcaatctctattaagggaacatatagagaaactcgggagacctgaacacttcactgtctgggggaatgggtgggcctctcaggaaccggaaggcacattgtgccccaggagccgtggactctaacctgaaaaacctatgacacacatgcttctcaaggcagctaggccaggccctcagttaccacacacaaactctgggaagttgatcctcagaaagacccacagacccccaactcgggaagcagaaataaaaccctttttctttacagccaaccctaaaactaaaagtattgggtgggaagtcccagtaagtaaaaggtgcttgttgcctggcctgaccaccagagttcagtccctggaacccacatggttaaaagagagaactgactcaatcaaacacacacacacacacacacacacacacacacacagagagagagagagagagagagagagagagagagagagagagagaaagagagagagagatgcacacacacacacacacacaacacagagacacacaccacacacacacacacacacagagagagagagagagagagagagagagagagagagagagacgagttaaacacaggctatcactctcatttccgctgctttccgagtcatctataatacaattctctgacataccatgcttgattgtaggttccaagacctctcattccagaatagtcctgcctcctactccaaaggaagtcacctctctggccaaagaggtcacaaatggcctccacagacagcttccctaggctgcctcacctcagcctattactgtgagattacaatcctttccttcaagcttgtatctgcatagttgtccattcttcaccaaaaccaatggcaatttttgatatattatagatatttagactttaaatctgaagacttttgtgggggcaggggtagtcaagacagatcaaaaccagccctggctttcatgaaactcgctctgtagaccagactggcctcaaactcagaaatctgcctgcctctcccccaagtgctgggattaaaggcatgaataccactgcctgacattaaatctgaagactgttttgtcatcaaaaacaatgtcaagtaaatttgtcattcttgcccccccaaaaaaagaaaataaaggaaaggaggaagggagggagggagggaggaaggaaggaaggaaggaaggaaggaaggaaggaaggacagataaatgcattggaacacaaggtttctccagaaaactgatgtctgttctttaacctgtacgctcagtagtttttcaagacaggttttctctgtgtaacagctctggctctcctgggactcactttgtagaccaggctggcccccaaatcacagagatccacctgcttctgtctcccaaatgctggtatcataggcatgtgccaccaccagcttgagcattttcttaattagtgaccagtgtgagaaggtggtgccacccctgggctggtggtcctgagttctataggcactgagcaagccacgaggagcaagccagtaagcagtacccctttacggcctctccatcagcccctccctgcaggttccttcccagtttgagttcctgccttggcttctctcagtggactgtgcttcaggatatgtaagccaagtgaaccctttcttcctcaggttgcttttgctcttggtgtttcatcatcatcatcattaacaccaccaccaccaccatcatcaccatcatcatgactaagatataatagtgccacaggctagggaccaaactcttgaaacatgggcctttgggggatgttcacaacgtaaatgattacaggcactagaagggagagttgactgcactaagacagggccaaggtgtgagaagcctgggggcaaggcagtggtatgcccctgctggctacgccgatggcatggctgtgcactggggatttctgattcttaaatccttgatgcctgagattgggctattttaggaggatttatgccacagaaattggccaatacgacaaattgggttttaaacttaatggagcatcagttgacctgcatagtgctggaccctgtatgtgaaagcaccagaattagcttgatttgggaggaaatgggctcttgatcaccagtagcaggactttgtgttgaggatgcggggccctccccgtgaccccagagctgtccagattgctggcttccagttccactttcttttggcccccatctctgactctatacttcgtttgtttgtttgtttgtttttttttgtgtgtctcattttgttttgttttagttttgtcctctccccaccgcctcgttctctctcaatagcatttctgtgtcaggtatctggaaaacacggctgctaaggatcttacagtttaactatagcagctccagctcctgaagacgactcgcttccctcttctagttccatagcccggaggactaccattcacttcctttctgcatggtccagccccacagtgggaggggtgatggtccagccccacagtgggaggggtgaagggccagccccacagtgggaggggtgatggtccagccccacagtgggaggggtgaagggccagccccacagtgggaggggtgaagggccagccccacagtgggaggggtgaagggccagccccacagtgggaggggtgaagggccagccccacagtgggaggggtgaagggccagccccacagtgggaggggtgaagggccagccccacagtgggaggggtgaagggccagcacgacgatgtcagcatgtcagcagtggttacatgaatacttcagcttatgttaccaccggatttgtggggagaagggtggcacttcccagaggaaacaaagtcctggactgaaaggcagtaagtaccaacctgagaagagtggcagagggccaagccgggacgctaactctgtccagggagcccaccggggaggagtatattgaacatcgagatcccgtttctgttgtggatcgcatggccctgatgttgggagtgagtacatacataacaagccaggcttgaggcactggcagtgactagcaggcagcagctcccatgcaagcacaagtgtacccacatccctcaccttcacagtgctgacctgggctttccttgtggctgactccgtcctgttgctaatcctctctttcccggggcactttgcaagtgttcactgtacccctggtaaccgtcctccaaccaaggttacatgacacaaactcaatctactcaaacacaagagaactttaaaccctcggtggcacctcccttaatatacacaggttataatttgttaaatccaattataaatgttattgtttaaaaaaaaattcagaattttggatttttgcttaaaatacagaaaataacgccaaactgacggaggctataggtcagtggtggagcatgtatttagtgaacagaaggccctggattccatccccagcaccctctgccccacaaatgaatattaaataattttaagagccaggatcttatcacatgcttgtaagcccagtgtttgcaggtaaaggcaggagggtcaggagcttaaagccagcttcaaatacacagtgagtttgaagccagcttatgttacacaagatgtagaatcaataaaggtaattaataatagtgatagtattatgggctggagagatggctcagtggctaaagcgtttacaacacagccagtaggatcagatttgagaaccctcgaaactgcatgacagctagcagatatggtggtaatcccagcgcttgagaagcagagacgggggatccctgggacaagttggctagctacactagccggaattggcaagctgagttcagtgagagaccctgcctcaatgggttaagtgatgaacaatcaaggaagatgcctgacgttgacatctttgtcaaacacattcacctgctttcatgtgccccacacatgaacatgcaaacatataatgcatgcatacacacataccacagcacacagctcaacagacttttgcaaactgtgcgattagcacccaaatccaggaaggaaatgtttctagcacccagaatgctcccctcacaatccctctttgtcactgctaacctccagagccctcatttctaacaaggggaatcagttgtgtgacttcctatgctgcctgtataaatagaccagcctggcgcattctctttgggtccagctgctttggttcagtaccacgcatgccataatcatcacactggctgtggaagctgtgactcactctcactagtgcagagaaacccactggatgaacacaccgtgacccatctcctctgtccctgtgcactgcagtgtctccagaacgggaggctttgagcagagccacagtggcatacttggttgactgtcaatgtgaaaactagcactaaactccacattcctggaaccttccagtgatctggcaaacttctcggccctgggtttagccagctcaatcattgagcagagggttataaaaccaaacggcaagggagacagagagagattgatggaggagaaaataaaacaaaacctgtgctagacagaattcagatgccatcacaagactacagcacacattaatcttcccaggacaccatctatacaccgattctctgttccaccccacagagtgacattagaacaattggatgcttcatgtaatccctgaccaacatgctgtggtcacgtgaccctcagtattactgtttttattacaagacaaacccgagacctactctttttcctgagagagacactgtcctgttctaagttacttcttctgcttgcttacctgtctgttcctttaatctcagtgtgtgtttgcttttgtgaagaaactgagcccttcattaaaataaaagacaatgcctcagagaagccagcccacccctctgcctggtttgtagttagaaacagtctctgctgtaaggattttaactttatgagggttgacatttactcctgaatttgaattgcagaaaaccagactcccaaaataaactctcaaagcttggatgaccttgccatctgcatgtactatacagtagcaaatgctatggccccattcatggctgtgcctaatgagcagaacccctaaacaaaagaggagggcgggctggggaagcaggaagaggggacacacagagtagacacggcaatggcctttgactgaatcgtggcgatggcattctgcagatgtcatgggtaaaaagcatgtgggagcatttataatttgcagaaaatactgccaccctgccggttgactcagtgtatataaacactgtgctttggataagaattggggaggaaagttttgtcagtagtcctaaatagtttttctacatcattggtccattcttcatatggaagataaatgctggcttgaacagctttgtgctttgaagtaggttttgacccaggaaagaacaaagcctcaaaagccaaacccagaatgttctgtcactgtcatgtgtgtactgctccctaaccctaatcctaacacttaccctaacactaaccctaaccctaaccctaaccctaaccctgccaaaaggcaattcgaatttttcttaggtaagccagtcacgctggaaccatggccgttcacaatacaaatgtttgccctctggcccttttgttctttcacattctatctgtggattctagttctgtgaggaagggccatacatatgaacaggtgaaacacctagacactggaaatcatgcttggtttatccctatggtggccttggcctcatccttccagaccttttctgtataagtggggctgttggagagcagaaggaagacctggacatcaagatgattggttagtgtttttaaattaagatatgagttggaaaacaaagtttatctcttttctggaagcaggctgatgtccgtctgggcacaccgtctacattaatacaggaaggctctgttctgtattggagggaggcttggggagcctagaaagacttttttagctgtaaaaggtccttcagccactaagtactcaaagttctagcttcacagctttttagccaaatgggaccctgttgagatgagtttaatagtaaatgtgataggtaggcaagtatcaagttgtcttctagtgctgtggctgaccttggatggcttaatggaccttaggggccatgggccaacagaaagaagagggaaggcatgctctttgcaacaagccaacccaggattcagggccaaggataaaagacacagggtctatcttcaggggggtctgtttagtgataacccaacctgtgataatgaaggtggaacacacaagatccagaaatcagtaagctgcaagccagtattctccacccacacacgaggaaactggggcccatagagaggataaattgcttgaccgaggtcacccagctcccacctcgggacacagtttctcttttcaccaattccttcccagatattctctcccagaagggctgctgctaaacacagtagctggcatgtctgtgctgtgagtctacacggtactctgccttgactcccggttacagcttggctgtggtttgtgacctaaaggtttatgtactagaagctgggtcccctgtttgttggtattaaggggtgatagaacttttaagaagtgggtcctagtgggaggtaattaggtcattaggagtgccacccttggaaaagacccatgtgagtcctgaaggagcaagttaggtctctcaaggctgaattggtgacttacgatggctattacaaggcaagtctggcttctttgcctcactctctcaggctttctttctcacctttcgatcctttcccccccccccacacacaccatgtgctcttggcatatgcagctacaggaggcagcacagtctgaggccctcaccaggggctcaggagatcagcactgctgtggcatctcccgtctatgagttcagcaacacacactttccatttgtcagtaacaagtgagcccagtgcaagactcatcagcctcagaattcccttagtctatgacaccttattaatggaggtaactgtgatgcaaccctggtccccagctgtaacaggagagaacatgacatctcttgagctagggagtggtgatgacagggaacatgttttgttctgtttctggcatcagggaacaatacatccagtcactgggatacttgtgatgttgtgaactctcttgatagaaattttcttttttctctttctcattgtcagggtaatgtacaagacgagctcaagtcccatacctcccttgtcttgctctttgacctatatgttcaaaattaaaacaaaagttctcaattatgtgcagaaaagagagcaaatgttcattgattgttggggataaaattattttcttactatttgtgccacaggtgaacacgatctttgggacgtaaactctttcaaaatagatccttcttttgcgatcttgcatgcatccatttgtggttgacagggtgatgatgcagccctctttgaggtcactggaagccaaattttgttgtattgtggtaaaggctttcactggataagatggcatagtaagtggatgggtttccgtgccttccagctagctgtatgcactgaagagtggcattttatcatagctgcactgaagaaaagggaagcttagactcagcaaagggctcagtgaccttgcttagcatgtggttggcctttggttcagatcccagcacggaaagaacactttggacagcaaggaaacccaagctaattaacctaaatgacatattctcgatcagtccgctccattgaatttgccttaaaaatgaaagctgaaccatttctctgcttcaaaggttcacggtggtcttggaagagggctgcttggctcatgcggctgtctgcagcttgctaactcatcttgtgagttttcctgttccttaaccttcccacttcagctccggtccactctcccctgccgaggccacctgctcttccatgtgaaatgaacccattggactttgtctcattgccactgccctctggtagagatggtctccagttccagagccttcaatgcctgtgagttacgcttatgtttcttcatcctgccccgtcctggtctagcaatgtctcctgctacttccctttatagagactttcctaaaaataagccaatgagatcttccaacagagcccctggagaaccctcctgctggcctgtccaaatcctccctatttttcaggatctaactcaattgctccttgcagcctccctaatccctgtggctgatggggacttatccctgctttgcgctcttggggcactttatcattttccctggttactccggcttccattttctgccttggattacagtcacttaagactgccccaattttctcgtcagaccgggagtttcctcatggatagagaagatttatcttttttttttttttttttttttgagacagggtctcactatatagctctgactgtcctagacatcactgtgtagaccaggatggcttcaagctcacagagatccgcctgcctctgcctcctgcgtgctgggattaaaggcgtgcgccacttcagctggctgatctgtctttgaaactgacaaagcatctagccagcgtttgacggttgggctcaagccatgtgcatactgatccgcctccctccaggtccgttcatttggcgccttcattctgctaaggaagccactctctttccatatcatagcaccccttctccccgcagcccagcgccttcctgtccacccttgcagttctctatacctatttaacattgcatcccctcccctccccgttaccactcccctgctctactgtcctgcagcccacgctcttgtgagacacactcatcttcagcagctctcacgtcaaactcacctggctgaaacaacaccagctcagagtcacagcaggaccacagtgagagtgtcctccttctcaggagggcgaccctgaccatcctcacttgtctgcacagcctgactggagaccggagagcccttccacgcctcaaactccagcttggcttcattcccaacacttggaccttgttgcctcccgacttccagttttgccttaaagcggcggctctcaacctgtgggtggtgtggtgacccctttggaagccaaatgtccctttcacagggcttgtgtatcagatacctgcatatcagatattttcatgatgagcaaaattacagttatgaagtagcaagaatagttttctggttgggggtcaccactgcatggggaactgtgtttgagggacacagagaatcactgctttaaagggatccccaccctcttttgtcctgggccacattctgtacccttagcaggcctcaggtctacgcaccagagtttatctctggatgagctagtgcaatctgtgctaagggttcttgtccctcggctctcaggcctgcactcaggggttcaaaatgagtttgtaggaacagttctggaatacagcccttcctcaattttattatagtccaccactaacaagtttgacttttatgaataagattattaaaatgcatgactttaataaaccatgtctaaatatgcatttggtcctttctcataaatcttattttcacttaccatggcacctttgctaaactggccgactagttttggagacttttctgatggccttatccatttccttggcactctcccactaggggggatgggatcaacttcctagacaaaatgttcatccctttgccagggggttggggcatcaatggtaagctgatgcagccctggagcatcgttcaaccagccactaagtcttcaggtgagttcaagctgagtgtgacttagggagtgaccaggacagcctgtgaaatggagcttgggcccccacagaggtagcaggccccgtgggggcttcgcttccctaatccatgcctttcccaccatctcactctgatcctcctagtcagacacttgccaggaatcactgactttgggtccaccccagagccggtcacgagctaggacttacatggcagtgaatcctgggagggaggaatagcctgagtctagtttaacatgaagacagatttcctctcttcctcacagacagcagtgtgagtgtccacttcacattggcccctctccatctccagcttcaaccccattgacttataacccagaaggcagggagggacccctatacccacttcttgcatagagcttctctcccctagagattggtttctacaaagctctcaaccttggtaccatccccccactccccatgtacctgtgggacacaggccaagctccttcctgcccttccctgtgcatctccctccatcacgtccctgggccttgtgtggacaaggaggctctctctctctctctctctctctctctctctctctctctctctctctctctctctctccaccctgtcctgcctgaagggccttctcccacattctttctccaggagaaggcaaacacccctctgaggctgctgagttggagcactgagaagcatctgctaatgcctgtgtgtcagagaaggaattttctcttctgtgaacacagccctgccatggctggactgtgattgcttatgttttacatcttataggggagaggccatgcccgtcaaaggaagtataaggcacagggaaggtctggtgctgatgctggggatgcacctggtagggaatggcttacttacagcagcaagcgcgtcctaacctggattccactcccacagatacacccacacccacacccaaaccatgcctgggtctggagctagacagagtccaaatactgcagcattaagcaactatataacctcagacaaatgtcttgggctctatgagcccatttttccctcctgaaatgttccaatactagaacctgactcagaaggtttgtgtgagggttaaaaatgggttgagggccagagagaagctctgcggttaagagtgtgtgcatgctgcttttgcccagggccagagttcagttcccagcactcatggcaggcaactcatgaacacctgcaacaccagttccaactgatgcaattcctttggcctccaaggacacctgcactcatgtgcacaaacccacacaagcacataactaaactaaaataaaataaaatctgtgacaaatgggttgaaaaggctacgtcattatcttccacagagatagcccttgataaatattaaccatttagaaatcacagctttcccggtattaatattatttgtctacatgtcacagcagagacattgcagaggggagcatttgtgaagctcctgagaagcaggcctccctggccactccaaacctgccgtatcagaatgccttgggatgcagactgaatgagaccaagaagccgggacaactaaggcagtgtaggatcctagactatcatgaagacacacatacatcaatttgcaagacacaaatgagtcccacggtctggttaatagtatcatgcttacactaactagcatcctggttttagtaagtgtgccatgaaggcttatttgggggatgctggatgagggaaacgacatatgctattttttcggtcttttctaagtctaaagttaatgcaaaatagattttttaaattcacctgggcaaagcatgtgtattaccaagactttccattgaggagtgattttggtgtgcaccctacccccatcagctgtgcacagctgggagcccactcctgtgggtgaactgaactgacatagaaatggagacggaatttatttacttaaggctggcctttcagacaatagagactttcctgcctccaagcttcatcttggagtgcagggtattcagcgttacaagagttacagagacactgggtgggaaatcctcacaggcgctcagaacattccagattgccaacttgagtggccacatctgcatttcctttgtcagacaaacacactactttcctgtaagtcatgtcacatgaggggctggagagatggctgagcccttaagaacacgttctgcttttgcagaaaacccaagtttctttccttcctgggacccacatgacagcttacaagtgccnnnnnnnnnnnnnnnnnnnnnnnnnnnnnnnnnnnnnnnnnnnnnnnnnnnnnnnnnnnnnnnnnnnnnnnnnnnnnnnnnnnnnnnnnnnnnnnnnnnnnnnnnnnnnnnnnnnnnnnnnnnnnnnnnnnnnnnnnnnnnnnnnnnnnnnnnnnnnnnnnnnnnnnnnnnnnnnnnnnnnnnnnnnnnnnnnnnnnnnnnnnnnnnnnnnnnnnnnnnnnnnnnnnnnnnnnnnnnnnnnnnnnnnnnnnnnnnnnnnnnnnnnnnnnnnnnnnnnnnnnnnnnnnnnnnnnnnnnnnnnnnnnnnnnnnnnnnnnnnnnnnnnnnnnnnnnnnnnnnnnnnnnnnnnnnnnnnnnnnnnnnnnnnnnnnnnnnnnnnnnnnnnnnnnnnnnnnnnnnnnnnnnnnnnnnnnnnnnnnnnnnnnnnnnnnnnnnncacacacacaacacacacacatacacacacacacacacaccaacacacacacatacacacacacacacacacacacacacacacacacacacacacacgcttaaaaatccatctgagccgagggaatgaggagccttgacccaacccttcccttggactttaccgcccatgtagaagagatggccattaataggaaaagcactggaaagggaaagcaggggtgacacacccccttcctatgaacacattatgatttatgatgtgtgcccttggtgaccatttaacaccagtgtccttttggctacctccactatgaatttacaagcatactataaacatgactgcctggcacttttgctggcccgcaggaccctgcacatcacgctgcagacccagcaattacagcagttttaaaaaatgaagtgcagtcagcactttccccatgtagtctcagaaagtgcttagtagatttccgaggaggacaggtctctttctaactgtgtgttccttaagtttattactggatctcgaaatattaatgagcactttttttgtttttctagacagggtttctctgtgtagcattgggtctcctggaactcactctgtagaccaggctggcctcaaactcgcagagatccacctgcctctgcctcctgagtgctgggattaaaggcaccaccgctggcactaacaagcattcttatgcttaccactaagtttatgtcttactttgagaagtttctagaaatgaaaagttttcaatttaagtttctcattgtaatctcagtgaaaaggagggttattctttagagaaaaacctactgatttaatattgagagatgtaagtgtaaaatatctttcacttcaaagagaataaagacagcttattcttgagccagataggatggctgtgatgcagggcatccctcaatgggaatgattgcgtgagctgtcactagttacagaacaaaaggaagccatacatcaaggcagttatccagtgctttggtggtagccaaagttaggcaagttacagctaagcagggagaaacatctgctatagacatcagatgctactcggtgactttcttagtttggggactggtagaaattagtgatcttctaagaacacattttaaaagctggactggtacaaagagctgtgagggcaggcaggagtggctctcaggggactgagccctgtccaaggtaacttggctctgaatctgtaacatttcaccttctacaatcaaggagaatcctaaccagctgttcagccctgcagaatattcaatgcaagagctccttctaaaccctggttttcagggacaaaaaaattctgaaatcccatctcccaagggtctgaaccatccaccccatgcatgggaattacccaggaggaacgtgaaaaaatggcatgtctgactgagcgcctcgtgggccagcccaaggcagctatcatatcctgttgacataggcatggaggcaggaggatggaccccctccaagtagggctaacctcaggtctgctttgtcacacaaactcacagaaataaaagacctgtggagaactacggcatcaagccacgtgaaatcatgttcataattgcccttcacgctccaccacccaacagggctgattatcgcctgagccatatccccagccctcgcctgccatgtgatttgggttctttgtggcaaatgattgcttattcttcaggctgcatttgctattgtcaagaatgggtgtttcaataacaaaccactgtgggaaaggcaacttggaaaacatttccgataagccctctttataatccaagatgaatccttcagtgccctcacagtctacttgccgaggcagtatagcttcaacacagatacttctagagacaggatggagggactgagggaagggaggaggacagagtggtagagggagagaggaggagaggaaagagggagagagaaagaaaggaagagaaggggagatggagagagggagagatacagatatagagagcagaggggggaagagaaaaagagggagagatggaggtgatagagggagagatggagagaagagaggggcacgaaggagagacacacggatataaatagagatgagagagagacagagacagacagaaatgtgagaatattattaaccgctgagccatccccagctccaacatctggattttcacttggcttgggccagaagaatactgcacacagaaaaaccctccggagccagctctgtcaccacagcgctcctgtctctgcctgcccccattcaaacagacgatgatacagagataaacataacccaaggtgcagtaaattcataataatggcgttggtggcgcacgcctttaatcccagcactcgggaggcagaggcaggcggatctctgtgagttcgaggccannnnnnnnnnnnnnnnnnnnnnnnnnnnnnnnnnnnnnnnnnnnnnnnnnnnnnnnnnnnnnnnnnnnnnnnnnnnnnnnnnnnnnnnnnnnnnnnnnnnnnnnnnnnnnnnnnnnnnnnnnnnnnnnnnnnnnnnnnnnnnnnnnnnnnnnnnnnnnnnnnnnnnnnnnnnnnnnnnnnnnnnnnnnnnnnnnnnnnnnnnnngtctccagagcgagtgccaggataggctccaaagctacacagagaaaccctttcttgaaaaaccaaaaaaaaaaaaaaaatcctcattattataatactgaagtcgcctgctcttatatgtttctgagacagagtctcactgtgaatcagcctcctgtctccaccccccaggtgctgggattacaattgtgcacggaccacacctgatctttcctttcaattttaaaggatgtggaaaagaaaactccagaggctctcacacagtatcctaggtttgagtcacaacagctcagcagccagcagagaagtccacactgtctatcacagcctagcgagctggcccggagcaagctatccaacctttgcatttacccacctcccatgcacaaagctgccctgcttgtccctcagccagtggggacaggatgttaggagcttgctgtcctactcagcatccagctacacagaacgtccacgtggggacaggccagctctctggagtgggacagagctacaaaggcacttctcatcccagaaggggctgggtgtggcagctttgtgcacagacatctgtcacaacaggcaggagccagcgaccatggtgttcctactggaacaggggcgcagctgtaggtgatggcacagtttaggtgatctgagaacatgccatcaggctcgcagaccccatggcacagtttgcacacagcctcaatctccaggtccttaactgcttgtcttattccaaggatgctgtgtctctagcttctgatcccttcctcccttctcccctccccttcctgtgacctctgcttttccaggctctcaaccctctctctgtctttgcatctgtgttactgttcacattggccctcttggctcggccttcactaggctggtgagccctgaagccacgcctcccagtgccaatagatgtcaagagtgttatcctggcaggcaaggccttggcccttctctaagctgagacctttcagggtgagaccagactgagaggcaacagttgagtacagctagcaggtgggctggaagccccagcggtgagctgcagggctcagcagccaccttaatgccctggtattagacaaaggggacaatgggacagcatgcagctataacaaaaacaggagaaaagctcttcaaaatgaaatggaggaccacgagaagaaaagcggggggccagggagtgtataatgcaagacctttgcaggagagaaaggccccggacttgctggctgcttctgtgcaagcgagactatggaaaggacagctggaaaacaaggtgtttattagtgtggtggacatgctggtgtggaagacctgggtgcgtggctggggtggagtagaaagagggcaaggaaagaaggatgctttgctgagtctattgtttgtgcagtggggaatttgagtgtgtttcacatcctcagaaaaatagtgaaagcatcaagggctagggccagttgtgtgtgtatgtgtggggggggttcaaaatgaatataaacagagacaagtggccccagctattttgcaaataaaggatgactatgcttacgggttcaaagcaagcaagtgtctgtttcgaagaactgcagacaggcaataaactacaggctgggaccgtgtttctgaagtggtttgggttttcaatgtccacactaccttagatggattctaagactgactgataatggtgtgtgtttcaggaaacaagagtgtcgtgtctctcaaagtcggtagagacagttatagcgagtaaagaggctggtgtgcaccctgtggtctgtttgggaaaggtgtggcttgaattcaattgtggtcagaagtaactgagcatgtgcaggcatgtgtggcatgcatgtggatacagacaggatgataaacgagggtagaaatctaagtgaagggcatgagtgagaattctttgtgctatgttatttaagtccaaaaccatttcagaatcgtttaagacatgagtattagtggttacattaacagtgaaggcacctttaaaaaagtctattaaaacccttgcggtgtaatttctaaactgacaaacaccacgtggttttagaactggggtataacgcactttactcttcaccattttgacatttcaaaaattgctaatgagaagccataaaatgctcctgccaaccaaagaatcgtggatgtttattgctgaaagggacgcggaacaaccagtccgcttttctttttctgtaattccttccggactctttcattataattgacaccagttagtttattttcttaacaaaacaacaaaaacagaggctacagagccctgcaaagacccagatgcctatgacagatggcaagagggacacgagtagccttcccagcatcacaaaccacctgaacctagcactggcaagacgccttgactcggaggacagctcatagtctgtctctggggccacgtgtctccacgccttgtttgtcccacctttctccctgcaggtggatggtgccatgtctgccacctcctgatggcagcctcagctcctggggctccactccccagggctttctcacttgcagactggtgggaagttgttcattcttgtgccttactctacacagggcagcagctgattggccagcatggttgttctcctacttagaccttctcctcagaaagattaatgcaagtgtaatttttgcacatgattccaagggccttgggagtctacagcataagcatggtcgggggtggggggaaagtctctgattggtaaagtcatttggttttgttgagttgtttgctagtcccttctcttctcttcacctctcttatatgtgaaaggaacagggaagtgagtcatgaatatttgtacaacgtaaacctgggttcatatcccagcagcacatcttacaccaattgtagcaaaatgctccttgggggggatacaagcaaagtcacacaattatgttttgcgtctcatttccaattgacgacagcaaccacacgtcttcacaaacggttcctgtgcagctctcttagcacagtgcccacctgtagtggcagcaaacaatgtttccgtggattgtttagctgtatcaattgctgctgcctctgcgcttgcagcccacgtcatccttttaagacagtgtgaattctattccctctcccttcccagtttcccacctggatgctgtgacatacagaaccccatcaaaacaacttctcagccttgctttcccaagttccaaatagctttctcccacaccaccccaagttgtgtgctttggtcgggcttctgagtcacgaaagcaaacaagaaacagaaatagaactccagttgacttcaaagagggagattagctagcttatcacagaagttttagcttataaaactggaatagactcaaggaagtagaactgatgttagatacaactgcatttagggactccaactaggtcagccagaccaaggccacgccgactttcttctcctcaatcccatggcttattagacagaaccaatccacagtgttgacctcttgtcaggtctggctgaaatccaccttctagcatccctactagagggaacgcctctctgctccaacaattagaggaacagtgacctcacgtgcagccccgagcagatctctgtggctggagagaccggagatactcactgccaggcagtggtcacacagatacctgggaacttgtccagcacaagagcctatctccaggaggtccattctccccagctaggagtgtgtggagtgagagatgcttcctcagcgaagtgtcagacctgctctcagaaggaaggctaagagccggtactgtgaagcacagcatctctcaattttaactgccattccattttcctccgctttcttcttgaaactttagttttgtgacagtttcttataccccaaagcaaaggcaacgacattagggcccaggacctgcccttttccaagactacccttatcttgtgtcagcatttcccagagggataatgacagaatgggagtttattaatgatgttgatagcccacagcaaggacaagaacgcagacagatttgccagtttcatgttactatttgtggtttcgtactatcatgttaccattaggagtttataaccttgagagatagtcccatctatatgtatgtgggcttcatagtttgtgactcaggaagcaaggccatctgctcataattaaagataattaggaggaatatagatgtgacctagttaatttttctataatctcacaaaagggattccaacactcttatctttttctcatttctcatcagccaatgctgtcgagctacattgctccttgtgtagagccttgaaaggaagtgattgaacttgctttcccagctctgttaaatgttatcgctcaccctgcctgcctgtaataagatccatcaagcaaatgagataatgcacgtacatgctctttaaaaattacaactcaaaagcagaatggtagggtcattaaacaacaattaaagccacttactaagtcatctaacaattatttacaaaatatgtgccattttcaagcatccacggcagtttcaagggctgcaaaaacaagcaccatggtttctaaagcagcgttctactaacaggccatgcaaaccattacagcatcagggggctggctatgtgtgtcacaggcacccatcaccttgagaggggatcctccaggacagtcaggtatttcagacaggactctgagaatgggtgctaccgtgtcagatggaataggggaaaggctgtgcctggccagacggggcagagagacagagggcatgccggcaaggccccgagattcccagtgacttcctgatagctggctcatccatcttggtctgtgagcatctgcatccatcttctgcgtctcgctccttattgggtttgctgccactttgaagaatatgtggctaaatgttctttgtcacctcatatttggtatcatatatctttccttcttagattttcaatttccgcttctctttcaacagaaaattataactactttatttagttgtccaggatagaaagacccagagtttgaaacttagcaaagctaaaacatacttcccctaacaattgttaccttcaaattttctattatcaacccaagtcagagccttccaaattgtgctttctttaataatattaatttcatgcagaattctcacctcaaagtaggacagagaaatatgccatataagcaactatattacattttttttaatcatcaggtctggagagatggctcagtggttaagagcacttactactgatgggggaggtccttctgtgtatatgactgtcttattggttaataaataaagtactgttggccaataggaaaacaataggactgggagtcaaggaggattctgggaaatgtaggagaaatcagagagtcaccatgtgagccggggaagacaggacgcttgcccctggtgcccgataagtcttataaaatatatagatttatgataattaagactgagctagcagatgagaattcatagtcattggccaagaagcatttgtacctaatataagtctctgtgtgttacttgggaccttaacatggtggagggcggaacttgggcggcctggcggaaagcgcccacatggcagcagggcttgggtggcttggagtaaagacttattgttacaaactacagaggttcagtttccagaacccatatcaggtgactagcagccacttgtaactccagttcctgggaatccaacaacctgcctggcctccttcaggcacctgcgtgtacttgctgtgcataaacccatgcagacacacgcatacatataaatacgcttttagaatctttttttttttaagatccacaatagcatcttgatttcccctacctaggtagaatcttttggtgttcatcatgaccatgtgtcttcagctctctgcccatggtttctcagttgtgcaacctcaggttcatgtcaaccatggtcaggggaatttctccatgtttatggcctcctcatcccaggtgtgaattctctgcatcgttctctccatccacaaagcatgtggagccaatcctcactcttattaagaaagtacagaataaatgaatttttaagtaaaggaagggaactagagacagacagacaaagacacaaagagagaggcagagagactgatccagcttggatccaatccacgttgccttggacagctctggccagagccgctgatgtctagggcatacttctggtatgccagaaaaagtcctactcagattcccatctgtgccaggttattctctagggtacagaaaaatgaatgaaaaagagttgaggctttgattcaggaagcagaagcatcctctaccaagctacaatgtagacagagagaatgaatcggtcttcacagaaatccacattcattaagagtgaatcaagccatttaaacgctgagtgctatatttaatcactactctactgaagaaggggataaaaaaataaatttcaaaagagagtgtcttctcacctccattgctcatcactgctggagcagctctccaaatctctacatccagtaaccgcccctacaacgacattttaatggctcttcattcagacagttttgtttggaataatgggagtcatttgggttcagacaatctggttctataaaggcgtaagattctaccaggtctcaggggacatgaagtgctagcatttctccagagctgggccaaaaagacattcgggcttcctgcttgcaatccagtgtcctccactgatcaactccttagagctgtttgctctgtcttgcatagagaaaacgaaggctggccttgaactcagatctgcctgcctctgcctctcgagttctgggcgtgtgcaaactaccactgtccaagtgagttccaggacagccagggttacacagaaaaaccctgtctcagaaaaagaaggaaggaaggaagggaggaaggaaggaaggtagaaaggaagggagggagggaggaaggaagggaggaaggaaggaaaatgatggcatcctgacttgacaccaagtctgggagacaagaaggggttggaaaagtgcagagcaaggtgaaggccttgtggcaggggctccaggcatggtccacacattcctggttttcgtttctccattcacgctcacatcaacaagtagagcttattgaaaaatactacatcaagattagagtgagagccaaaaacgggaacatcatctcagggaacaggtagtccaggacatagagatggaggaatgtcccaaatgatgctatggtgtgggccttacttacacagctcctaaatgttgtgttgaaggcttggtccccttctttagtggtgggatctaatgtgaggtctttagggtcactgggactctaccctcaaatgcaatgactggacttggatctcttcatcttctttcacactgaactatgaaatgaactatcctactccactatgctcccccactgtgatagactgggctgatatatgtgcaaaggatcagggccagttatcagggactgagaacttctacaactgtgaaccaactctttaagtgacttagtctcaggtatttgttacagtaacgaaagctgacagatgcaatgaaaagggagattccccagatgcaggtggtcaaaggatcagccaatcagaaccagagacagtaagtaagaaagaggagcctatgtgttttgaatattcagtgacatacaactgggagagtttatagacatggttgtaagaaacaccttaaaaagcaagcaaaacaaagacagttgttcaccttacaaacaaaagctacaaaaggttatatcacaaaggagatacaaacagctcggctgtgaacatgctttccatgataataacaatgtaagccttaggtacagagtggatcaatattgcataaatatattgacatgttgaagaggagtggggtcaaccaaagagcaactgacaaaggcttgaattctcaccctgccctccaaaaggaagtcaacacataatatctgaagctgagaatcaagacatcatgctacaagtgtgacatctagaaaaatcaagctaacatccccttgccaggaaaaaaaagttagagaagctaaaaatggttgttttgggactgggaaattaagtgagggaataatggaatagagttttaaagaaagctgcattgaactgtttttgttgttttgttttttgagacagggtttctctgtgtagccctggcggtcctggaactcactctgtagaccaggctggcctcaaactcagagatccacctgcctctgcctccaaagtgctgggattaaaggtgtgtgccatcatgctagctaagcatggaactatctgactgcctcaattttactcatatataacatggctaaaaatacccgttaagcaaacaaaagcagctatatgcgtctcagtgttgtttcaaatcatatcatagtgctaaataaaatacagacatcccagttgaatttgagctctctctctctctctctctctctctctctctctctctctctctgtgtgtgtgtgtgtgtgtgtgtgtgtgtgtgtgacagagagagagagagagagagagagagagagagagagagagagagagagaacctatagggtctcacacttactaagcaagtactctgctactgagccatgctgtgtgtggcttgaccttgtacttcgtaaacatcaagcaattttaagtaggttatgttccagacattgaatgtgatatggttttattaaaaaaataaatgttgagttgaaattcaaatttagtgttgtctatttttattttctcaacctgatacccatcaatcataagaatccgtgtcactagctattttgtttactttattacagaggccactttgtaaacagcagagaaatttcttaagtcttatttccaggatgaagtatgttatctcccaagaaatgagctctttttcctcctcctaagtagtctgaaccatgcagagaaacagttctctactgaagaactgtcatcaagagctgtcgttctgatgaagtctagccccctggtctaaatttggtggaggcaccacaaacttggtactgaggcattgagcaaaatggctacataacccaaatgccaaaagttaaaacattgtgaagagcaaacaacaaataaagccccttgtggctttccaagccaacagccccagaaaaatattcagaattggctgtgtccccagagaccaagcctggagtcaacaccattcagaaggcacagaagtgtgtctgggaataaggcctttcttattacttcacaagacaagcattagtcatgacacccaggcaggccactcgttaggatgctgaattttgctctttgtccctgtgggaagagattatctgtcatcaaggagatgctagcctcagcttccagagaagggaacaaattatcccttgctggctcgttagcatcactgttcaaaagcaccaagagagaaggaactctaaagggaaatgaacacacaccaaaaacttacttggcacttgcaggcagactctgctttggagcaattagctaggatccatgcagtgtggaagtcctctgccttgctcaactcccataggacagagcacaaggaagcagcctgctcttgcagtactcacagccacatacttctgctgtgactttgtctagttgtgaatggcatcaagtgcgttggcttacagtgtgtctgggaagtgccttagaagctcagagggcacagggtagggagtgtgagccctctctggagtgagaagggacagacagccaaaacctgactttcatcacttacttctgagctgggttcacattgagccagcagctgctagctttgtttccgcatctgcaaaatgggtatgacaggtccatctccctcacaaacagcacagagaaaatccctaccgaatgtaaactcacccttttgagctgggcaacctctccccacggccccccatctgagcacttccttagacccactgaggttcgctagatgattgaatttgaactctggactaaagatgatgggtggaacaaagtctgtcatagcaggagtgtaagatccatagcatgataggaagcgtccatatgggtggagcccagaagtggaattaccaatggagctgctggttggggtaccaggaaacacctaccttccagaacattcctggcagtgtacaaagtgggcacttcctttctgaatcagtaactaacatatttgtgggatctaggaaggacttacagatgcggatggtcttgccacacacttggcacaagctttccacctggtgggaggtggtattgggggtgtggtgactgaatggggttggggaaggacattttatcttcatgtgcccagaggcagagaagacagaaaaggaagacttactgcaagatcccatggtcacccagccctagcttacacagtaccatcccaatataatcacctatgacctgtggggatgtgactgcttgccttattgattaggtcaccaatattttaaaaaaagatttatttttaatatgtagatttaatttattatgtagacagtgttctgcctgtgtgcatgactgcacaccagaagagggcaccagatctcattacagatggttgtgagccaccatgtggttgctgggagttgaacttgggacctttggaagagcaggcagtgctcttaaccaatgagccatctctccagcctggtatttttaaaactactatttacagagagagagagagagaaagagagagaaagagagagagagacagagagagagagagacagagagagagacagagagagacacagagagagagagacagagagagagaagagacagagagagagagaagagagagagagagagagacagagaggctatggtacgtgtgtggcagtcagaggacaacttacaggagttacctccttccatcttgtggattcggggatggaactcaagccattagtcttgtccagaccatcactctttagcaatgtacatgcatgcctgtctttcctgccatgtagccaagtactctgctggacaaatagagtgggtgagaagtaccctatagcagcttccaggcaacacccttaaaagatgacaggcaggtggcccttgccatttcctatcagtcttctggagtaagtgagcatgacagtgggagaacagggggacagaagcagcatagaagcctgagtccttgagactaggaatggccatgtttgctaattctgtgtgtgtgtgtgtgtgtgtgtgtgtgtgtgtgtgtgtgtgcacgcaagcacacacacatgcatgtacgcacatgtacggaggccaaaggctgacgtcaggtacagaagctgcctgtctccaccagcacctgtcccatgtagcctgacactaagggcacagatgtgtgctgttattcctggcttttatggaggttctggggatccaaatttaaccctcctgctcccacaggaagcattttgcccactgagccatctcccaacccaggtcatcttccttctgtaagccaattttgctatggatcttcagcatacacatctgaacctaattattctaagagacacatcttctaaacaagaaggattggaatcattagaaagaacgattaaagcaaactaactccaacagaaaggattctcagggcaaccgtaggaccagacgttttcatcccagacaaccgggaaagaaacgttcaatcttggatgcccattcagaacattacacaaaaccccctttctttctacttaatttctgtaaaagttttgctgcgtgcctggggttggacttgttttgcagttttcttttaatccttgtaattgcctcagcatgaaggacttcttgtcgtttccaatctaaatttaaattgaaggcttttttgcatcatctgtcttcatgctccacgtggcatcagtgcacggttctgttcctcagggccgggaggcagcctacacatctgcgacttgcccagcccatttcctggctggtgactgcagcaccttctctgtttacagccaatagtcagtgtgttcatctcacggctgaggagaaatctgcttgtgtcatcacactgaggcttcggacggtttatctgggctgtttctcacagctggcatctgctaaagccagtctccgacagatgatttaccacaattatcacagtgatgggtattagtctgtgtctcacatcctgagtctccaggaaatcaaggcagaccataggaagcagagctattacccaactagggctttgtgtcttcttatatttagatttcacagggacagtgactctagagccacgtggcttcacatttctaatatgtccgacacaggctgagtcatcatgacttggggctatggaatgaggggaaatgaccactgtgtttctcaaactctctgatggcaagagaattaaccctaagtccctctttcctatctagaacaccaaaatcagactatcatggggacagtctggggagctgtatttgaacaatccttgggcagttagggaattactgatctagcattctgtgagggcgcaactgtcttgccaagggagccagtggggtcagtgactatggagacaggcagacccaaccacctatggtcctggatgaggatgctatttcttagagcctcagtgtctttgtctgtaaaatggggatagtaggtctcacttctccagtgcttgctgaagactacaaatatgatacaagaagacacttggtgctcagtatgagcttagccaatggtggccaccacgcaggagactctgcagtctcctctaactttggcaccactgggaactgggtctgaagaaagagccctgtggtgtagaccacatcttcccagctcacagagacagggcagaagacacggacattccatgcacagtctcatttctcgtgaagagctttctaagcggtaggcagatggttctttgtgggcaacgggagacaattacaatgtagtcccttaaagctgtaaccatacatccatccacagaaactcattctctagaatcttaaacgtggttcagaaatcttgacggatattgtttgtcctaaatcatttgggatgttctatatagactttactggtgccaggccattggtgctcgtacaggcctggccgaaaacctctgttgcttcagtcacctccctccttgtgcagtgaggctgggacttggaatctgggctcagtatgttggcaaactctaaaaatcaggcagtgctgttttgtcaccctgcttggaagaacacgaggacaaacactgtcccaccagctgtctgaactttctggcactgatttggacaacaaacagtatgactttttgacagaaagaaaaggtaaccagaaaagcgcgtgtggctgagtgtaaaatgcccactgcacagccccaacacaatgaggagctgggcgtaggacagatggacaagggtgatgacaatctccaaacttctaggcatactgtcgtttagtcttcagagctgagccttgaaatgggtggtagtcagtctgcccctttgatggatgagaaaacaggcattctttctaagaacttcgtagaaccttggacaaattgcttcacatgccacgacaatgatgtctaactatttgagaaatgagagtagactaaaacttatttatcctaaaccacaaagtctcatttcttatgctttcctcccccttggatcggcctctggtgagttcttagctacaatcttttgtggggtttgtttcatggctaaagtgggggaaacaatgtattctctacctaaaagtttttaaaagatcagacgaattcatgtacgaaagcactgtgcagccaaaaggccacatcccatgtgtcggggagctctattcctcagttgaacaagctgccctaagttacaaccagtacaccctagagatatgatgcaggcttttccttagccaccacttctttaatggtagaagatacattttgggggttctagagttattcataggcccagatttcaagggccctgcaatttcatcttcaacactatcatgagtgctccacggtcagtggtacccagcatgctctgagaatgcacaagagacagtctgctagaccaagacacctcaaaggaactgtagctaatgtcaaggctgtgcgatggcccagtctggaccctccagttcttcaggaaactccttcctctcctcctggccattcacctgccacagtcagtctctttggtgctcccggtgtcccctgtacaaaggcagtttcctgaatgctgctattctcaacaacacacaggaaactcaagaagactcaaataacaagtcccagccctgcgtctcaccgtttattctgcagacccacccgcactacagagatgaacctggccacacccttgctagtatgtagagaatccatcctttccaccctaaagtggatgctagtgaagggcagatcacaggctggagccaacctggcaggttctcagagttcactgcaagtgcagcaggacagcagagcctggaagagggcactgacccttggacagagtatgagagggaggagctctagtccccaggagggcaatgccagaggggtccccaggacacggttgaccagctaggagccaggcagctctgggcttctaatgaatccccagagatcaaggccagccctggacagcctctgacactgctctgagtgagtcccgcgtgacttcctggcaggctgggcgtagtctggtcaccttgaccaccagaaagagaaaccttgggaaaaggacgctgctgtgccctggcttgctcccttgcagtcaccatccctgacctggggattctgagagcatgcctgcccagagccctagaagagcccctctgcccacaccacaccttactgttttaaatacatatctcaagccaaagttgctaacaaggttggagaaacgtgtgagaaggaagacagtggtggcactgaaggagatgagccagcaaatccaagaaactaaacgccggcgggaaaggctgctgaaggacagcaggcagctactagaggaaaaatacctcgtgcaggctgaaaaccagtttttcgtggaacacctgcgtaaaaacagcgagcagtgtgaaaagaaacaggaggcgctgtggaagcagtatgcccaagaatgtggcgagatcgaacgaaggagacaagacctggcgtccagatacacccagagaaatgcagcccttcgagcacagctcctacagggcagagagacccaggaggggttaaagcggcagctgcaggatctgaagaccgtttacaaggtaaaggaggggcaggacaagaaaatacaggccttggagaaggagagagagaaaatccgatgtgagacagcggccaaggaccaggaggcacacaagcagttcctgcgggagaaggccctggtggagaaggagctggaagaattgcacttggggcagatgagcgccaaggggctcacggggaagtacaaggccttggcactggcatgcaagcaggctcattttgagttctgtggcagcctccacagagagaaccagcagagacggaaggaacttcagcatctgggtcaggagtaccgcaaggtggaagccgtgaggagccagttggagaagcagcagcggctggtgaaggaggaacggtggtatctagaagccttgatcagggggcggcagcggctgcaggcaggacgtgagcgccatcgtgctcacaacccgtgcctcaaggcagggggctcttcaaagaccaaattctaagtaacagctaccataagtgattaaagaatctgagtgctggagataatctgcaatccaagaagtctccaccgtggagaatagaatggtggtgtcatgaagggcaattgtgccatgttggattgtgctcctaccctggggcgcatatactggctggctgcctccccagggctgttgtggattccagagatttagaacatttggaaaactttttaaagagttgtgccatacatttttatagcagtgtttgaaattctcagattgcttagttacgacacgaattttaactcctaccacctttgtttttgtcttcatgtgcactttatagtccacaaagtgtggtatataattcatatgctctgtgtatttttacccatttgaaacaagtaggaatcacattctaaactgtagggaatttcgtttatttgtttatatgtttgcacttgtgatgggtcatttgttgaactgtgggttctgatctgagggaatggtcgtatgttttggcaatgccccagcatgggaaaatgtggttgactttatgtttctcagaaattattgactatgaaagcttcaaagtaactttttagaatttataacctttatttatatgtaaagtggattcatttaaaataggactaaaagaagaattcacttttcaatgtgtcttagaatataacttttaacattgctggtgaaatgtgcactttgccattaaacagtattgtcaaagacaaaacccacatgtgattatttcttactcccccagctctgtaaatgcagtaggaatattacatctgttttattatatgttccattatattgttgtcacccttttgatgaggtgataggacatttatgtggtgacatacaataggcaaatgatgtaagcatcgtgacccaggttgggttactggatcagggctacgttaacacaaatgttgtagtatgacaacagcctgcctaatatacgagacagcgattgggtggctaacaggtgtatacggcatgaatacactgggcaaggatcatttgtgccccttttgtaatgcttggatggtacaatatttcattgcctttctcggacacatgaaatagatgaattgtttccatacagcatttgattttgggctgaaattgaacacagataactgaaaaggtgggaagggaagccgtgggtaagaggagctgccacagttctccgtgctattggtaaaggaggggtattcctatactgcatttcttttctcatgaataagcatggtaagttctcctcgagtttggaggctaactgcgaatctttttcctttgtgccttgtgccatttttatattgtctaaccagtgggaagagctggcttgatgctgacaggttgcttcaggcctccagagctgagacaggtaatctttttcctaacggcctggaaaatacaaatacaaggccctgtgcttcttgtggatgctacagcataacatgctaccccacagcgtagaacagccccaggaagcataaggggcgggacagtcatgtcacagtaagatttcatttacaagacagccacaatttacccatctctgtcctagaagaataaaagtttcctagttccttctttcaccatccacatgtacacgtgttgactgtgaatatgcaggcatgaggcatgcaagccagatgttaactgacgtactgaggtgaaagtgaagccacgcttggggcaagcctcttgagaggtgaaggtgcctcctctactccagtaggctaaggaccctcttgctgtacttccggcccaaccccatctgtgttctacaccaaccggacagatcctggcccccttcccctaactatgagcacccatgcaacacacacacacacacacacacacacacacacacacacacacacacacacacacacagagcccgccagtcgtacaggagacatgtgaggcagaccccttccaagaaatatgacctctagacttacactgaaacaatccaagctactccatattaaacacacattcttcgttcttagaattccttttttttcttctctttaagttctagtctcccaccatactgcttagcttcccatcttctagtaacttctatcaccttgctgggcagaactactaaaccattatctcaatgcatctctttacacagctgctgggagacctcctcctcattctccctctagccactgcaggggaaaggggccgtgcacgtcaccatgtgcttgaaaccaccctctctctctcaactcaaaagccaaattttggttttccttttagataacatgtttttcttccatgacataattgaaaatcagttcgttatgattttttttattttgtttcgtaagctctagtgtaaacaggaagacagagttacaaggcaagagggaagggaatactggagcaatcattcagcaaggcagagaggacggccgtcccaaggacaccagcagcaggagctccctgttttcctaagatgtcatcattgtatgtggtaccagtggcctctatcctggggtgtgtttgttctagaacagatgctaaagagtggaccccattgtactgacaagagtggtcccatcagactaaatacatttgttgaacaatttccctgatgagagaatactatgccactctcaaaacaacataaaaaaaaccaaaaaaaaacaaaaaaaacagatgcccactctactgtgttgtcaaatacttctcagccagaaattactcagccagaattactattggaatattcaagagagaagtgtaaggagacggctgtcttactgttgtgtgaaccctctcttactgtaacaaaaaactgacatggtcaatttaggaagagaaaagggttgatttggctcaccgtttgggagactttaatctgtatataataccttagcctagttgcttttcagcctgtggcaaagaattgcaccatggaggagtcatgggcacagcaaaggtactctggagactgagacaggataaggaagaggctgaggtctctctgtccccttcaagccttccctccccccagtgatgagaagagctctttataaagtcccttgccgccgggcgttggtggcgcatgcctttaatcccagcactcgggaggcagaggcaggcagatctctgtgagtccgaggccagcctggtctccagagcgagtgccagaacaggctccaaagctacacagagaaaccctgtcttgaaaaaccaaaaagtaaaataaataaataaataaataaataaataaataaatgtccctccaaattgagaggtttcaaaagataggtttttaaaactgtgatacatcaaatgtgcatcacgacatcatgtggccatgcatggttactctcatcctcagagctagcccttctgctatgtcctcttgagaataaaaagggaaataaataaaattaaaatataacttgcatattaaattatgcaatccaaaacttagaggaaaccccacatatcaggggtctccaagaatgaaccctggttatttccaggaaatcttaacattctgaaagaaaggaaagatgaagcattagtttagggctcaaagccaggagatgaagagttcacactttcactgttgggttcccagaatctgtaaaagggaaaagctcacgcttaaagtcaaatagactctgttattcttttgcttaaattagaaattcgagagatggacatggactatagagagcacattaaccagtttattaaagggcggaagagcgagaggggaagaggagaaatggaagaacagagcagggaagagagtaagagagaagagagctagagagaggttgactgccagagagagagagaggacaataatgttgcggatttaaaagggggagctctcacctgtgcactgaatccctccctatacagccccgtaatgagtgacgtagtcatgacatggccatgcaacacggggccctttaagctgtctagctatctgcctgaacctttcagactcagtgtggtggtttgaaagaaaatgccccccaaagggagtggcattattttgttggagtaggtatggccttgttggaggaagtgtgccactgacgagggggactttgaggtctcatatatgctcaaaatgctgcccagtgactcagaccacttcctgttgcctgcaagtcaagatgtaggactcttagctacttctccagcaccaaatctgcctgcacactgtcatgccccaccatgatgataatggactaaacctctgaaactgtaagccaccccaataaatgttttcctttataagagatgccatgatcatggtgtctcttcacggcaatagataccctaaccgagacattcagggtacgtgatttgatccttccactctaaatcttatacaagttactcaatttcccagcctctgttctctcatttttaaaatagtaaaattgctcagagttaagtaagataatgcatgtaaagtagcatgcaaattgttgtttaatagatgtttcccttcctgtcccctctatggaattaagataaataagattctatttgtgcaataagctagcttgtatatattggtataattttacctattaacaactatcttatgcaagccttctaaaactgctatgaaaaagcatctataattacttttaataagaatcttaaatgaaatcattttgctacaaagagcttttgttttaaatggaaagcataaaagctatcaaaaaggattttattatggctaagtgatagtatttggtttctgagctcaaatagatagaggtaaattggcttttgtaaggccatgtgcttgccattaggttaagtgttttatgttaaaattttaccatacccttttaacaatatggaaataagaggctaagggatattaaatgataccatcccattgtaaaagcctgccaaaatgaaactcacacccaaactacattcacaaaagacccctttttgactgggctgtggatgtcgtgcaaaaaacacaatggttgtggcaaagtacaataggtggccaagcagaggcagtgacagttgttagactgcctgtccccatgtcacagaccttaccagtaaggagaacatgagtcctgtggatttagaggctgatcctgcacaacagacagtgtaaggcgtgtgtggcatctgaccctcttgccctccaagacccatggtggggaagagagaacatgggtggacaccatgcagcatgggtgcgacacctctgaggaccactgagcttcaataaccctgtgtttgttgttgtaatggcacctctgggaacttgtcatcctccctgcaagagagccgctgtcaccattactctgaatgtaaagaagtcttcctaagcggtgggaaatctgtcttttccctgtcctcactatcttgactcttggcatgtaaatgaatttaagtaaacttgccatcaaggtccatatgtgaataaaaactgggagacccagagactgtcttccattcccaaaccataatgagatggtaatacgccagccttgtttgttttctctgccttcattaaacacacatctcttcatttatatgctcattcaaaattaattcactgactgaaaatgaaatcatgggaaggctcttatccccactggaggaatcttccaagtaagtagatgatgccacatggaggaaaagacgtgagcacctgaagattgctcctcaggaaatggatggtctcaggcacacagactcttccattcccgtgacgagcattaaagtctgtttctttactaaacaatattgagaattttgctatgtaaaacgacacgtatttactataaaattcttcaaactcatgtaaacgttttaaaaggtgttaatcactgctatggtttgggtgactggctttcacaggtcctttttgttaccatcaaagcactatggggagctggtggaacccattttagccaagtgggtaacacactcctgtaatcctagcatccagaaggaaaaggcagggcatcatgagttaattcaagggctacagagcatgcacgcacgcacgcacgcacgcacgcacgcacacacacatacacacacacaccacacacatacacacacacaccacacacatacacacacaccacacacatacacacacacacacacacacaccacacacatacacacacacaccacacacatacacacacacaccacacacatacacacaccacacacatacacacacacacacacacaccacacacatacacacacacaccacacacatacacacacacacacatacacacacaccacacacatacacacacacacacacacacacaccacacacacacacacacacacacacatacacacacaccacacacatacacacacaccacacacatacacacacacacacacacacacacaccacacacacacacacacgcacgcacgcacgcacgcacacatgcacagacacacacacacagacacataccacacacacagagacacacacacagacacagacacacagacacacaacacacatacaccacacccacatccaccagacacacacacacacacacacaccacacacacacaccgccacacacacacagacacacaccacacacacagagacacacacacagacacagacacacagacacacaacacacatacaccacacacacacacacacacacacacacacacacacacacacacacacacacacagacacacacacacagacacacacacacagacacacacacacatagacacacacacaccacacacagagacacacagacacacagacacacacacacacatatatatgaatacatgtatatgggaccttgtagtggtgtgaatcagatgtcccccatatttttggccatttgaatacttggtgcccagtaagcacaactgtttgggtaggtttaggaggtgtggctttgctggaagaaatctatcactggtgtgggggtggagggagatttgttcaatcccagttcacctatctcacttcctgtttgtggttttttaagataggagttctccaattgctgttccagctccaataatggagatcatagcatctccattgtgatggtgatggactctctagccctctggaacaggaaacccaaataaacccttccttccctaagctgtcttggtcatggtgttttatcacagcaacagaaaagtagctgagacagacctcctggaaagtctttgggtcattggaaggtgtgtctccaaaggagactgtaggatcatagtcttttttatatttcctacttcctggtatgatgtgagcagtttcagcagtcatgttctcttgccatgtcattctgccttgacatggcttccaaaacaaagagaccagttgattgtgccttggaacctcccaaactgtgaccaaaatacctctttctttttaaaggttgatcatttcgggtacgtgtcttggtaatgccagcagagctggccatcattgtgccacccagatgctaactttctggcgttttcttcttggtgaatttacagttacagcacttctatgggaatttcatggacctctctttttcttaattactgcttcagtatgaatgggaacttgatttactgacctttttcccttaacatttataataaaacaaaaacaattttaatggccacacgttcgtttatcatgcatatacataatgatttacttggccagcccttcttatccggtggttttaattttcactgtgatctgcaaatgcttcacacatctttcctcgaatctctctgttcatttcattgtgattgattgacaacagcaagatgattgaattagaggatatcgatataccgctgggctgccctccggaagtgctgaactcttttacagtctccaccagagtatagagaggtggacggtaatccagagaagggtaggacgggggaaggggggatgagacagagttgcagtgtagacagcacacagctgaattactcatcctgaacccccaaccatgtttctcttcaagcacccgtcagtgaaggtgctggcccgttttattcatttggttgccgggcacaggcgcccacaaaccagtgcttctaaggctttcattgtggctacctgggcttgaataaatgtaccccaaaggcttggtgcccaggatggtgctactaggaggtggggtagaggttttaagtggaaggggaacataaacaaaacggaggttcttaggccagtgtggccctgccctcaaagctgactgtgggatccagtctcttcctcttattctctttacttcctggttgatgggaacggttttctttcaccatgtgctcacccacgatgcattgcgtctccagagagcaaaatcaatgatactgctccatcatgaactctgagccaaagaagactgttaaagctgttgttcatcagttactaatctcagccagctcaatagtgatagaaatctgactaattgggggggggggcaggtcccatctgaattctcagagagtctaaggatttaggaagtcacgagcttcagctctagaacctaaatgattttcccccctttgaaaggatttgcagatgctgagaggtgccataacttctgaaacattgcctaaaatcagtcactaaataattgtcaaactacaaaagtcccaggctctccttagttttccttccctaaatttacatccttttatttaaaaaatatcccataactgcatttcccaacattgcagctagagaagataatgttggagataagccaagagcagtcttcacaaacacagccactggtgacgttctttcccttccaggctctcatttacaagggaggcattttcccacctgcacacctgtaaacagggtatcagactagatggactccattgagtatgttaatccaaatctctgtggccttcctcttagcaggcctctagaagtccccctctgtaagccaaccatgctgatacctttatgaataaagctaatcccacaggtacctttgagttcactgggattatagacttaagacagtagtaactaattaaaaatcactgagagcctacttttcttggtagctttacttgcatgatacaacggtttacaacacttacagctaacggtatccccaccttgtagatgagggaaccgaaaggcagaaactgattctcttcaagatgcaaaatgaacccagcgattaaacctaaagcccgcattgttccaaaaacaatccctagattttcttcaaacagtaccagagtcacacccaatcaaggagaacaaacactaagtgtcttgacacttgatggatctcatcccttctgtcacgatgccctccttttggacggttttaattgtgtggattgtgtctatcagaggcttggcttaaatggccatatgctagtctttccctctgctctaggctttgaaggttggtaaatagccttgactttttcctcttctattttttctataatttgtctattaaaaacacaacttattttataaaaatgtggcttaacatgttgaatttaataagtgttatgataataactttctcaccaaattcttggccattcagcttaatccatttcttgaagataggatggacagatgttggatttttacatgtgatagcatgtttgtgaaaggttcaggcattatgctggcctgcctctgttacctggaagaatccattcaggcagtaacctggtcagcccagggttccatgggaactaagtctgcatgcaggtgcaaaggaaagacccacttatgctgtcttctctctgcttctgcttctcttctctgcctcttctcttacgctctctctgcctctctatggcgaccggccatggcggtcagccattaaccctgttcctcttctctcttagtctccctactctgccaggcctataataaactggttaatatgtctcttaatatgtctctaatagtctcatcttgtgtctcatctcgagcctcttcttttatttctaatttaagcaaaagaataacactttgtattaatccagtacccactgcatgctagatactcatccatgcgtctggataaaatagtggaagctaacaagtttactaaacaaacaattaaatcaacatgttaaaattataatattcgtaactgctatgaaggaaacagagagtgttatgaaggtttatagcccaggtgaaggagaaatgatgtttatcaccttaagaaaacaagacacactgtattaattaaataaaacaattgaattgcaaagaatcgatgtctcagccaaatgtgatatcttgtatctagcctagcactgcagaaactgagacataaggatcttgagttcaaagcaagcctggctaaacagagaccctgtctcaaaaattccaaatctctctctctctctctctctctctctctctctctctctctctctctctctgtcacacacacacacacacacacacacacacacacacacaccatggggggtgagggcaatcaaagtctttaacatattttataattctgagtctacacacacatgcacacacacaggaggggaaattaaatctttgacatattctgtaactgtgagtcttttttataactataacaattttatagttttctacaaatacattgttcaattttcattgttaaggttatttgtagccatttcataactactgcaattgcaatctagcctcgggtctcattatattttataacttgtttttaatgttttaaaaaagcaggctattgatctttatgtaattacttaggtattcagctattttatcaagctcattaagtcttagatgtttttctgatgttacttcttagagttttcagtagttataatcttatctgcaaaaaaataatagctttcttctctgaagattatctttgcttctttctactctacttttatcaagttggacagaatgtctagaaaactaagtaataacggcagttatgagcatcttggctgcacctgacttgatgaacaggtctttattatcatatttcatctgatgctggctcatgcttaagtatgatattttttaaccaggttaagaaatttaccacctattcctaattttgaaggagcttttattagaacggatgttgaatttgatcgtccctcctgtgtttccttaatgatctctcaaataaggtcattattctttaaggttattagctgcagcaccagtcacatttggtcctgccatttacaggttctttcttttcaatgccgccacattccctgcgccctggtagatccagcagccttggagaggaagagcagaagcagagtttcagaccccagtggtgggggctggagagagagctgagaagtttaaagcatttgctccacaattgcaggaggcagagttcagatgccaacacccacgtgacaacaaggcctcactgcaaaagcctgcaagcccagctccaggcaggacagaaactaaaggatcaccagggcttgctggctcccaaactagccaagaagatacaaagcacaggtgcagggagagaccctgcctcaaaggaacaggcagggagagatggaggtggacatctgatgctttctctgcctgcttgctcttgctcatgcagacaagtccattccctcactggcattagagcctacttctggattctggtgtataccagagaccagctgaaacattcagccttgatgaactactgggttcttggaccttctgttggtagtcagccatcgttagggtggctaaacccaacctataagccattctaataaatccccttttatatcctgattcactaattgtgagaggcaatggatttggtgactctgtatataaaacttttaatatgtggaaaactaaggataatgatgatgctggtcaattgctcctagcatctctagataaattgacaaaggaaaagaatgctctccatgataaaatcaacaaacttttagcatctcagaatatggtgaaggacaacaatgaactaactcagtgattaaatgtgcataaacaatccaggagtttctaagtgtctcagttagggtcactgttgctatgatgaaacacaatggccaaaagcaacttgcggaggaaagggtgcctttggctaacacttccacattatagtccatagtcaggacaggaactcaaacggggccagaacctggaggcaggggctgaggcaaagtccatggaggagtgctgcttactggcttgcccctcatggcttgctcagcctgctttcttgtagaatccaggaccaccagcccagggatggcaccacctacaatggtctgggccttcctccatcaaccactaattaagaaaatgccctacagacttgcctacagcctaatcttatggggggcatttcttaattgaagtcctctcctttcagatgactttagcttgggtcaagttgacgtaaaactagccagcacaggcctggaagggaatcttctctctagcagtcacagagctcaagttgaggaaaacaaaactgaagccctcattgtaagattggctgaattacaaagaaagttcaagtcccagggagggtgttggcagttaaaggaaagatgttaattggtaaagaatgggatcctgttatttggggtgaaaatgtgtaggagaaccctactgaggctgaaaactttgaaccctcagattctcaagggtttatctcacccaaggaagcagtctctccaccgtcagcagaagatgtactcaccctcccctcatcccctgaaataattgccttttccgtttttgactgagcaaatgaatcattgtctgctaaacaggcagtgattcttcctgaagaagatgccaggcaagacaacagtgatgtcccttggggcccagcaatagttggctctggccctataaccagacataagtctaagcaggctcccagaggggaggcagagagtgtcaccatgaggaggtacactacaccacaaagggcacaccgagtatgctaactcattcatgcagaagtctggagagtatgtgtcggataggttttaaaggtgtgggataatggcaaaaagaacataaaactggataaggctggatttgtttctatgggcccactgagtggacattctaggtttattttggaagcttacacattaaacaaggtgtcaaaagtttgtttgaatggttgactgaagcatttgttgaaagatggtctactgagaagcggatggagatgcctgacagcccttggcctagttgttgatgaagggattttaaggctcagggaaattgcaaatactagggtggttcctccacaatgggagggcccagaagacatgccgttcactaagcctgtaagacacaaaatggtgagagaaacatcagcacacttgaagagctttcttgtcactctttcttatgccgaatcttagggttggagacactgctgctcagttggatgagctaaatataagggtttaattgggccccaaagtcagcagggaccaactggcaactcattatcactaaacgccaggtgattgcagttatcataatggacagcaagggaaagcagcgcccataatggaggagtgctgcttactggcttgcccctcatggcttgctcagcctgctttcttgtagaatccaggaccaccagcccagggatggcaccacctacaatggtctgggcagcacagcccaagtgatttttatggtgccatgactgatatgggtcttggatactggctaatcaacgttggtgtttccagggacggaagtagataagaggcctactgtatttttgtttgatctatataaacagaaaaattctcaaacgaaagaatccattagattctggcaaaagagaatctcagccctcgagctaatttccagacgagccagtttgcagacccaggacctcttgaatgaagggatggccaggttcccctgagaaaggaccttgataaaacaactgaatgttttactgttggcctttctgcagtcctccccatagggacctatggcctttcacaagggtaactgtacaacaggggaaagaaaaccatcagaaatcctggggtccttcaatgggttctgaatcaacacaaattgccagaaactccaggaaaaattgtggtcctccaattaaattaggggtgtattgatagagttttggctaaagtctgactcacattagacccagtgggcctcagaactcatactatggctatttctccagtcctagaatgtataattgggataaatatactgagaagttggcagaattcttgcatcaattccctgacctatggagtgagggctattattgtttgaaaggctaaatggaagcctttagatttgcctctgccaaagaaaataataaataaaaaacagcattgcatcccaggaggaattgtagaaattagtgccaccatcaagtacttgaaagatacatgggtggtggttcccaccacatctccctttagctctcctctctggccagtgcagaagacagatggattgtggagaatgatagttgacaatggaaaactcagtcaagtagtgattccgattgcggctgctgcacccgatacgatgtgttagtctgctcaagtaaggacatctcccggtgcatggctaaagtctgcagctactgatctagaaaacatctttttctcagcacctgttcgtaaggaccacctgaagcaatttgctttcagttggcaagaccagcagtataccttatcgttttttacctcagtttggagatatattaactctccaaacctgtgttatcacctctctatataaagacagacagacagacagattcattctgtaagttctcttcttgtagagagccctggctaacacaaaatctgaccctactttgtatcttctgagagaataacatgtatttgattcccatcattttactctttcctgaaatggctccaaaacaaagagaacagaaattggaatgtccatgctggaggaagaacctccagagagagaacgtgatcaggcctgcaggagactagcgtgttcctttaggcagctttggggtcctcagggtgaggagggcatgggatggcttccttttcatcttccccaatagctaaacagtaatcaggtccacatgctttcgattttacagaaaactattctttgtattagatcctcaactgacggggatctgttccacaggtagcctaggagaggatcattcaaacaaaattatggctttgtttgcttctagtaattttgtaaagaaaaagaaaagcccacgccttgtgcaaaataggaaattaggaaaggggctgcagctcagtggtaaggcatttgcctggcatgtgcaaggccttcgagtgtgcaaggccttcacatgtgcaaggtcctgctgtatgcaaggccctggcgtgtgcaaggttctgctgtatgcaaggccctggcgtgtgcaaggtcctgctgtatgcaaggccctggtgtgtgcaaggctctggtgtgtacaaggccttgatgtgtgtgaggccctggtgtgtgcgaggccctagtgtgtacaaggtcctggtgtgtgcaaggccctgctgtatgcaaggccctggcgtgtgcaaggtcctgctgtatgcaaggccctggtgtgtgcaaggctctggtgtgtacaaggccttgatgtgtgtgaggccctggtgtgtgcgaggccctagtgtgtacagggtcctggtgtgtgcaaggccctggtgtatacaaggccctggtgtgtgcgaggccctagtgtgtacaaggtcctggtgtgtgcgaggccctagtgtgtacaaggtcctggtgtgtgcaaagccctggtgtgtgcaaggccctggtgtgtgcaaggccctgctgtgtgcaaggccctgctgtgtgcaaggccctggtgtgtgcaaggctctggtgtgtataaggccttgatgtgtgtgaagccctggtgtgtgcgaggccctagtgtgtacaaggtcctggtgtgtgcaagaccctggtgtatacaaggccctggtgtgttcgaggccctagtgtgtacaaggtcctggtgtgtgcaaagcccgagtgtgtgcaaggccatggtgtgtgcaaggccctgctgtatgcaaggccctggcgtgtgcaaggtcctgctgtatgcaagaccctggtgtgtacaaggtcctggtgtgtgcaagaccctggtgtgtgcaagaccctggtgtgtacaatgccctgatgtgtgcaaggccctggtatgtgcaagaccctggtgtgtacaaggtcctggtgtgtgcaaggccctggtgtgtgcaagactctggtgtgtacaaggtcctggtgtgtgcaaggccctgatgtgtgcaagaccctggtgtgtgcaaggtcctggtgtgtacaagaccctggtgtgtgcaaggccctggtgtgtgcaaggccctggtgtgtacaaggccctaatgtgtgcaaggccctggtgtgtgtaagatgctacagtgtgcaaggccttggcatgtgcaaggcccaggtgtgtgtaaaaccctggcctgtgtaaggtcctgggttctatcctctagatcagaaaaaaagaagagatctcttttaaatcctagtttgcatttatatctactcatggaataaggaagtataagcttttcttctgacttaaaagaaaatgccaaccatcatgtcttttagaaaatagagattaaattcgactttagttcattaccagaacaactaatgattcaggaagaaaactggtgacaatcacagaacatttttcttacaagtatcttgcttttggaggccccatctaaagagttgatttttatcttgctgagattatttacaccagcaagtgacaggctgcatcatttcccaactaagcaatataatttcgttttcagcatctagggaaatcgaatagactagaattacaatctgggaagggaaagaatagcatagaagtattgattaatgagttgtagggtgtgagatgtttttcatctttgtacttaaaagcaattctattttttacccatgttctcaaaggatgttacagaagacacagttctaaaccatagcaaccgttttaagctcctccttcccccttttcccattgttatcttgatcatacatcttgttgaccaaggctacctgtctgaatttcagcttgtagccaacactccttcgataacttgtcctggtcctggagatgcttccatccccactcctggaaacaattttcttccttccttactccatattcattttcttctatgacggagatgttctggtctttcctaggcactgtctgggaagatcctggggtaggagggtgggggggcttgggggctctctttcatggacagagaatgtgggagagactataaatctcaaattttaattttttcctttattacttttcattaatatagaatatctaatcaagatatgactggaaaaaactgaactccaaaatccatctggcgcactttagtccagacctgggttgtagggcatgatggacagaggtgctaggaagcagaagaacaaagctgtcattctgcagggggactgtccaagttctgtccaccttcccatggaaactgagtctccagctcgctcccccattctatcaagttgtgttcttggttttcttatatattgttgactttgtctcaaccacctcctgacacttctgatgctaccactccagtccaagccatgaccaattctcacagactgttgccatggcaaacccattgtttcttatacactttggggaaaaaaaaactgtcaacatatgatggcttgaagcaacaacaatatcttacagttcttcaagcctggatcttactgagctgaaaccaaggtataagcagggttggtttcttctggagcctccagagaaaactccatatcctgacttctcctgcctccatatactgcctgtctcctccatctcaaaacccacaggggctgtgaaggacttcccacctctgcttctctttacctccctctctccctcccaaaggactcttgtgatgaccttggtaccccctggataacccagaattgttgctccatcttatgaacagctgactaacagtgataactccatccacaacttaattcctccttggcatgtgaaatagcatttctgcactttctaaaagttaatggcatctttggcagggcattgttttgcttgtcaggcctcccaagttgctcccagcttccacccttgcttggctttgatctctccttcactcagcagcacatgatcgcatgttagaaccacatcatcttggtgtgtgcagtgccctcttgtatgctcaacccagcttcggctctgttaacatgtttgtgagtcgtggatattcctgttctgcctgggtcatccccactgtgtgatgggcactcgggtggcagtcagtcactttgataatgtctgcaggctgtcttcagctacattcagaaagactgctcctatactctctatgctatctttgcctttgccttatcctatttattgggatttgcatcatccgtagttcagagaaactggaagagcatgatgtcacctggaccttgaaagactgaaaacaaatggtaggctttaaaaaagcgtttaacttcgtgaagccctaatgtggttaagcatggtaaacactgggcaacagttgagaaagcctcccagaacaagtctaaaatttagacttatcttgttttctgttctgtatatccactcattcctaccaacattaattattaaaagtgatttagaagctcttttctaacccatgcccattcctccggtagactccagatcccagggtgttcaggacctagtttgctagccactcctgcccaggctgccaggtggcagtcccccgcttaggagatgggccatgctggctaacttgagataagggaacaaaggagtgttctaagactttgggtcaagtcaccaattctctctcttccaggattctcctgctttatctcctttttagctatggctggcctgcaactcactatgtagatcaggctggccttgaactcagagtctacctgagtgctgggactgatggtgtgccctgtcacacctggcctcctactttatctcttaatggtatagaatgaaaatgggcagtgaattagcgaaagtcctccttacacatgttaagccaactattctttagccagaaagagtcatttctgcttcagtctaacaggagaatcaaatattgtccctacatacactcctcttttgtctgtacatgtactccttttcttttagttttaattaaaacttattaactcacattgtgacttcctctttaaatttaataaaatatatctttaaaaaagacctttagaaaccactctcacaaagacctgaactcattataggagggaatttgatgtcaaatatgataacagttttaaaattaattttgctgaccgtccgctatccaaagacctggtgattctgaacccttgactgccaaacaacctaagagtctttgccaatcagtgaatccacacagttgctaccacttctgggcttcccttgtgtttcagatgtcccaagatcaagataggaagtcttagtgtggcaccaatatcccctccctgttgagaggagagcatgaccactaccagtgtcaagagaagtcacccaatccaatgtcacaccatatatccaccacatgccaggactgagggtaggcaagatgactgctgccattcataggcatgttcagtgtgggcattcacagcaatgacaaatagcatataactgctcacactgcagagcttgcatagctctacatttgccctaacttctcaaatcaatcagagaagctctacaaatcacaaactgatgcagctgagaaaagccatgcaagaatactagctcattagattagcaacctgtgtaagacatggtcctgggccccaggtgccttccagcagagttggacatgcaagaaaaacacagcgattattcatacgagtgtctagtagagcgtatacctgtcacagtatggatttgaagagcatcacctggcagtagtacacgtgtgattgttagtgaaggttgctgggaaatactccagcaccctcactgcttataccatttattttcctcttaacacttagaaggactcaaaggggaccgtgctggagggcagaggcttaggcgaggtgtctgctctgcagtatagagtcagaaggacaagactgggccaagcattgagaatgtgccaagggtcagggccagggaagcctggtaggaagctggagcccaaagccagggccaaatgccactggtgggtgagaaaggaaataatcagtcaagagccaaaaagaatccagaacagaaaagatgctaacatagagaaatcaaagaagattctgggaagatgtctaaaacaatgccgactgggcacagccatggttaaccaccagaaagcaaaagggttgtccggggttataaatgatgctataggacaagtggtcctcagaacagggtcctgatgccaagctggtgactcctgagaaccggttagaagtgccaatgcttcaactgtgtcccggatttaatgaaaacaaaagtccaaggattaacctagtacccacagtaaggaactgtagtcaggcaaactacagatctgctctacttccactgtgtagtgagaatcacccaggtaagttaaaaagtacccacagccagggcctcctagattgagtcatcaaaatcttggagggattggactgtggcgcgttggtagtctataaactccctgggagaaactccctaggaaaaccactagctctgcaaaccttcctaaggagaaactcctcataaatcactggtattaacatgtctccggggagagtggagtagtttccaaccatgtgttgtagtttatcagtccttgttttcaggatctgtgtagccttaaatgagatgtcttattgacaggactgtaggcaccatcctgctgaagactttctctctccagtgtcaatgtggaaactgtaatcctctaaaatcagtagagacaagattcctggaagcctgggaccagcacgtgaggtggccgtgcatctcagtaaacactgagcttggtaacttcaactgaggtgaactctgaagttggcaccagtctatgatgacggaagctttgctcaagccatcggggctgtggtcttacactgtctgctcagtcttgcaagctggcttgggattttatgagtctctccagaattccagccagtagaggaaagggtggtaccatgcctgtgtctttcttcctggcttgcagcctttctgacctgcccttgccctcgtccttagcccacctcgtgatctgagaaatgctgtgcctgtttgatgtcaattctatatcctggggagtgaggcttgcctgtgttaagcccatttgcagctcccatcatagccattataattacatgcaattatttgctaagggtgcttctaaatttgccggagaggtctgattaattccactcgtgataccctccaaactcccatcatattaagggtccactcacttcctccttgtagactaattaatctgaaaacaatccacatttaatagtctctgaagaatttccaggccacccactctgccaagctcagcccaacagaggagctccaccaggatctccagggtagcagagccccacacccccatatactaaaaaactgcctacccggcaccctcctcaggcagcctcattgtccatggggtgaactaagacctcttgactcatgataatttttctggagatttgttttctctgtttcgcatggtattaggtgagagagaaatataaaacaatactgtcactcctgcagagctgcccgcctgtctgtgctcaagcttgacctcttagtcaactgaagggatcagagggtggccggtggagaatgtgtgctgactgctaaggttaggaaggcgactgattgccctttcaatggttctcaacccatgagctgcaactcccggggcttcgaatgaccttttcagagggccacctaagacatctgcatatcatatttacactatgattcataacagtagcaaaactacagtagcaatgaaaataaaataaaaattttatggttggagtcaccacaacaggaggaactgtgttcaaggttgtggttgtgtagccctcatgcctagccacccctctcagaggctccagtaccaaccccactgggagttaaacttcagtgagttttggaggagacagtcaaaccacaccaacaatctcagtgctgtgtcattcacagtatgacttactccctctaatcaaacatggcctccttagaggaagaactgtctcctttcatcttctctcattgcctcatttcctaacataaatttctaataaccatgcctataatgtcagcacttggaaggcagaggctagaggattgggagttcaaggccaacctgagctacacagtgagaaactctctcaaataaaagaggaaaagaaaacatgaaacagatggacaaggttatacttccctactgaggcagaattggtatcaggagtggggttttattcttctctagaaacaaagtcccagcgtcatgcctgacataatgagtgctggcaggatgtctgcacagcgttcccaagccaacattctcacttggtagtcatgctttcttgggctccctgtggattctctgtgttctgtggggtatggagatccatgcttcccattactgagcccctggtatgctagctgctctgtgatttcttctgttgccacactcaccaacccatggcttcccctgccttcttagcatattttttttttctagtagctgtgtggtccaaatccttcccttgactgctttccctgccctttccctcctgtcctcttgtgcggcctcctctccactgcctcagtctgttgagctccctcacagccacataggaacaaagggaaggtcaatttctaaactcagtgacttcaaaatctgagctactcagttcacgttggagccagcagtgtgatgttatctctggtcacttatgctccaagatgaacatggttgtcacccattgttccccgaaatgttgtccaatcccaagcaacaggagcagagagatggcccattcatagctagtgttcattcatttggaggaatgggaaggaagccatgtcctgaagtatgtctcaaaggctgatgttgaaagcgcctacaccatattctcctggcaggcaatgagaaccacttaaaattcagattccataggcagggggatgcctactttgtggaaggaaaaggaccaatggagagagaagagggacgggcgtaacggggacaagcatggacaaggcacagcgatttacgtgtatgaaaatggagcccattgtttgtatactaactaaaaatatttaattaaaataagtttaatctgggcccaacctcaagcccatcagaggctctgagggagtctggggttgaggttttagcaagctgtgatgcaccttagctcaccagcccttggacatttgctataagttggatctcggttgtctcccaaggcccccgtgttgcagacttggtccatggcatagactaccaggagtcaggagagccacaggtggagggagcctttgtccccttgaaaggaactataggaccctaagccctacttttcttgctctctgctggcaagctcactagctaagtgggtttgtttcaccacaggcttctgatatgacatgctatctcaccatggtcccaaagcaatgcagcctattgatcctggactgaaacctctggatggtaatcccaattaactctttgctgtgtattcctggctgtcctggaacttgctctgtagaccatgctggcctcagactcacacagatcagcctgcctgcctttgcccccccccctccccagtgctgagatgaaaggtgtgagcctccactgctgggtaactctttgctctttacaaattgcttctcttgggtattttgttacaatccaggaaagctaactcacccagagaccgattgggtgtaaacaacctgacatatttctccatgttccacaataaactcggggagaatatagtccctttctcaaaagactatggatggtaacttgccagtgggcggtgtggaaagtggtatagagtaagaggacacatggagcatctaattcagattcagtagtacaaagaagctagttgctgtcattgccagaggcccgtggggatcctgtgcttctcattgcatttatcctgggctttttagatttacaatccaggttcagatggggaatgttcccaccagaggatgtagctaaagtattattgaagacgcagatactgccatggcatgtggagctggtaccaaggaacacagcaagagccaacattttggcaggggaagcaacgctgaccgtcaagggagagctcacagaataatggggaccagagaagcctgggcccataacccactttgcccatgttgatgctaccctggtcaattttgatggtgagtgggcaagccaataagattctctctggggaccgcaggttgggacctcttctctgaacactgattgctgaggttctgagcctgccaccctctctgagaactgcttggatgggagcttactgcctcccaaagccatggctcctgtagcagcctgaacttgatagagcagcccctatggtggtctgaggcacagcatactccttggaatcttctgaggcctttaaaaaggccgcatcagtgtttgtctttcccctctattaacagcatgcttctctccacccccctcctgtggtacagatgccaaaagagactctaaggaacctgtgtgccggagctccactctgggcaccctgcttagccacctgaaaccgactccatttcactcccacaccaagtgactatttccagtctggagctcttttctagagctaggatgacactggcccacaccttcctgctctgccttagctctgactcagaatattgacgagagatggggaaccatttattggggggggctttaaacccccaatagttgttctattcagaaaatctagagaaggcacagggtacacacagccctctaccatcaagtaagtcagcatagcaccctgccaaggcacgaagtcaggggagccagggtgggctgagctgcggccagaagagaaccagttcagctctgtctttcttcagtggtctctctgaaaggcacctctcagctaaggacagatgcagagtccctcaacaacaacaagagaccaagtcttaacagacacctgatgactttttcttcctagtgtcccttggcagcgaagactgggccaaagaacttggcctttggggcaagagtgatcaatgtttgattcccactgcctgtgtgaccctgggaagcctctatgctctgctgagcctctttccccatctgtacagtggaggcagcagctcttagagctggtgggaggattaaataaactaatgtatgtaaagctcctagcaaacagcctggctctcaaccactctcggcatcaggatcttccacatcaagtgttcttaagcttcgtgatgtgacgagttgtgactggtctcctgtaacagattcagctgcttgccactgcaccagttctaaatggagagactgtttacacttgagcaagacacgatgtcggttttaggcagctatatggggcagggagccatctaatgagcacagattatttttatccaccatctttgcatttgagatgttgctgttatgatacaggtcagccctttctgtctgggccctgctcacccacagtgtgggaaattatataacttcacttgacctcaaagggcatgagacaattggctcctaatgaaggaggaagcagagctctaggtaaggccagaaggccagggtgaggaacagctaagaccatggtgtagtcaggccagggctgtcactctagacacgaaatttccttggttctgttgtgagtctggattcactgtccatttgggcagcgttcactgcaagacaacaaggtccatagtgaaagaatatgctttagcccaagcagaggaaatgcaaagagaaaaccatcccatgcatcggagagtcaatgctacaggcttctatcagtggaacccacattcttcccagtccctttgtcaccatgtccttcaggcttctgctagcagtagaaactttgactacaccgtcatcatctcccccagtgtgtcctgacaaccctgggccccagctctgaaaaaaacagaaatgagcttggcctacggacagaacaagatcaacagggtacttgaacccactcccacctgagaggccactgggcaagtcggtaggatctcaggaccaagaattagtggtgtcttggcagacaggccatcttggtgacccagtgagtgactctgagctcctctagccttaaccccttccaaacccacactgcaacaagccacaagccacacaccaggaagaatgcctgggacagagattgtggccatatcccttggcttctttccactcctcactcctgacactgctccaagcgagaagcttatggttgacttctttgctggaatcacctcttcccaaatgctttagtggttggtacttgtgattgtgaaatggaggcctgtgttgatggcatccggaggagagggacccaggtgctctcaaggctgtggcagccctttcatgaaatcatatctcagtcaccatgaaggaaatctactgcccccccccacacacacacacatcctgtagcccttgccttctggatcacagcagcatgagcataaaatgggatcctcgggcagttagccatcagaacagaggttctcagcctgtgggtcttgaccctgtgaggctgcatatcagatctcctgcatagacaagtcataacagtacaaaactatagctataaagtaacaactgaataattgtatggttggggtcaccacaacatgaggaactgtactaaagggtcgcagtgttaggaaggttgagaaccactgccaacatgtaattcacactgaagaaaacctggaaacttccaggttacataaaccagaaccatggtcatgtcctccaagccatgaaatgcctaggacacccaggtcatcctggtggcctgcatctctgaaggaacagctttgacccattgtcttccaggtcactggtaagaggctgtgcaatttcaagatgaaccatggcttctgcccaactgtccactttaaccaacggtggactctagtcagtaaaaacacacctgcacattcccccaaataaaactggatggtgccccattgttggcgtgttacagtcaggcttctaccaagttatggggaaggggagtgccttaagtgctctgtctgtcgtggtgagggacaaattcctcagcatgaaacactgaggagaaaggcagaggtgttaggtgatcctacgtcctggtgacttgaagccacaaagagggagatttgttaaatgctaagattttgaaaagattttccccaactcctatgaaaactggcataattttgtcaattttatggataaagaaactatgttagtcagcgttgccttgctgtaacaaaagtacccaaaggaaattaagttctcaagagaaaagcttgtctgtgggattatcaggaggtttagtaaaataacccaagtgaagcacttgacctggtgtcaagcaggcagagatgtataaatgtaattaaagccattcaattaaaaacttactcccaagagattggcccttgcaaaagtaagctctgcctgtgtggggcagcctccttagctattagaaccgacctgacgagccttgctgatgtggagacgtatgtaaatatgaacctctctgggatcggggaagtgctccaggaccccagcagatacccaggtcttagatgcccaagttggcacagggtccctaaaaccataaaaatgcaaataaataaaatgcaataaatggctaagtatttgcttataactacacacttcaagatgatttacaatccctgacataatgcaaatgccatgttaatagttgttacactgttttcctttaggaatcataacaagaagtttgcatatgttcagtacagttttttcctaaatattttctgtccctagttgcagaggtgtctcttgggatggatagtcccatggatccaaagggccaattgtaaatctgcttacatgaaaatggacaagatggggtttggctacaggtgttgtcagagtggcctcctgggacacccagatgtaagcattgcttccttgccacacttctgccttcttatccttatgcgccaggctcacacccctcagtctccctctctctgttgtcaaaacacccctcagacctggtggtgcagtgatacagctatgatggattcttttcaaaccaaccaggtcatgtggcctttgaatacactctcttgaggctcttcatttctaagactgctcctggctggggttatggtcccttatctgggcagtgatgcaggagacacctttgcatctgggctagaatgagccttggaaccaagatgggcaaatcttcaacaaggtcttctgggtccctgttttgctggaaaacccagtcttagcaacaagggtgctgtcccaggggacccctgctggtccccctcagaggtgatgtctgtgcagaggtaccaggcaaagtcaggggcgaggaactgcccaaccgtgttcactccagtcctgttacttaaaggttgtgtaagggctctagtgtacaccaggaccctttcattttgcctgtttcctgcacactgcatgctagtcctttctctgggtccacgccactgtctcctgttctcccttgatcctccggccccagtttggagtcagaggacaagaggctccagaggcttttatttctctgccaggtggagctactgtcttgacagtcgaggtgggaatgtggtctttggggccagagccatgaggtcctcatctgaccttggctgagcccaatctctcgtcatgcaaactctagggtgtgaaggtgagatgtcagcagagaaacatccagcacaaagtgaaggtaagtcagggggcttcctgtggagcccccttcttcttacaacgccccattggggctccttgagcaccacctgaggctgcatgcagtcctgggttatcagaaccaggcttccctgagaagccttcccagcctggccatgtgcgtctccaacatctcctggcatagccaatgatcacaccacaaaattttacactccgtggctctcttgttcctttttatgtgtgaatttttctttcctaaaaacacttccagatctttttaggaacaagaagcctgccttactttcattaaaaaaaaaacaaaactcacaacagcttttagggtgtcagagaactaaaaggacccaataaatcccataagaggacaatgaatgggttgggagcaggctatcatccagcaggaggctcgaacaccaaagctcaacactttggttggatgaatgagtgaatgagtgaatgagtgaatgagtgaatgagtgaatgaatgaatgaacacccctccatctcctactttattactacagtcctcttattcaccattgtggttttcggagaaacaataaaactataaaaaggtagaatgagacaaaaatacgccaaagtgggatgacttcatttggtagttagagatagctctacttcctagggcgattcctggctccttgtcctctcctttgctggcaggaatcgagacacacatttggaaaacacatcccaaacacccatgctctggggcttttacttctatctcttttcacactcccctgcttctcccgtagctgttaagtaaggcacgggatggcaaattttaatataaaaaccagaagcatacatttaaactgctggtacttggagagaaaaatcttatgcttttagcttcgagctgcatcctgcacagggagatttctgtttactaatggtggcaattaaggcaaagtcttaggcttcacaaggctcctgcttactctagcagatgtgctaatcaattttcctgccacacacaatttttgactctagcttagtctgctgtatgtggcatatccccagactagacagcccctgttctgtgatatccttcttcttggtcacacccaaaacactgcttggcatcgaccaatggaactctggttgatatcttaaatgactggcgcagaaatgctagccatgtaactgtcacacgttacctcctctgtttcctcatttgcaaaaaagagaaaaaagaaacagatgatgctgcagttgagtgtgcttgcttacataaggcatttcgaatgactgctcaatggatgatcatcactgtgagagctagcacactccaatacacacgtggtgctgttaggtgaaatgcaactcagctgtattaggcatgaacactattggaagggaagaaatcaaagaaatcataaatccttgccttcccactcctggctgggcgtttgctctccacgtgtttacagaattgactggtgcctacaaacaaacgtcctctttgtatccagcctccaagaggctcctcagtgacattctctttctggacatcatgtccacatccaaggctagatcataaaatgcatcatgatttctccccctctctctgggatctttctggtggaagctatgtgtaggggaaatgctggtcgtgcccagttggaggctggcacaggtgacgcagacctcgcacacttgggcgtggtcagagtgacatagcaagactttaaatatgaggcatgcggttctctctgttccctggtctgcctggttgtacgggactgactccatcagttgagtactttcctaataaacatctgctcatcaaacttgctctgacctcattgtgatacacatttaattgcgatccactatatttggtgtcaggaggggatatttattttgtggatggagtaaagacttattgttacagctatgagcccactgtgaagaggggtaacaataggaacacagaagcctccagctgacacctgtgagggggccaccactgatgcaaatccaatcgctggtaagatgtcagatgggtacagctggccaacatctgggcttcgagctcaagagaggacccataccagaccctcccagcagagcagttccagatccttggcctgttaaaaactgcagcataatgaatattcactgtggcacacaactaactgggttgcaatgtaaaacttactgcacagcaatagatactaatgcattctgcagtccacgtaagcaggcctggatacttactctgagcacattagcaaaagacatagaaaggagacccaaacttgtaattctagttagtagtaggagatttacaagggctacagaaagttcatggcaggcattggcgacttagcaagaccctgtttcaagataaaaatcgcaaaagggctggggataagactcagtggtaggacacttgcctagcattttcgaggccagggttctatccccagtaccacacatgtattacccatgcccccacatccatacaaaggcaaaggaaagaaatgcaaatagaattctaagttttaaattcctcagtttgttttcctcagtgatacagagactggcctcaagccatgggtgtggtgtacagtgtcctctgtcatgctcccatctctccacatgtgtctggagacacaggttttagcacaggagatgtgtgcatcagagaagaaatggttgaagggacagcctttgcatcaacacctatgtgttggaataaagatggcccagcggctctaaaacacagagagtaggagaccagagaagcgatggtatttcccagagttgtaataccagaaagggaggacatcctgcatcagtgaaatgatgaatgaaaggaaggacacgatgaaggacagggaagagggatgtgttgaaacagatgtgaactctcaagggctggcgacaagggcctcctctgcatgcttgtacgttcaagctaatccatgacagaagttttgaaatcattcatggaatagatgaatgtgtgagtgactaaatagtacacgaacaaataaacagatcaattaacttgctagtaacaatctactctaagcactctagctatccaggcaagctatccactcagggctgcagcaagacaaaaatgtgtggctttgtttcatgagcttacacaatttgtcattgcatagatatcgattggcttagatattgtccataatgtaatgttttactgcttacaaaagacataatctctcctcctggcccatcaggcaaacatttgtgttctgtcctcacttcctgctgactgtctaggagcagcaaacagagtgggctgcagaatgaatgtcacaaatgcatgggacggtctccaggcagcagagctcagaggctacaaaggatctttcttgtgagatcaatgcattgtaattcccttctgacattgctccaggattctgggctcaaacatgccattctgctctgcatatctgaaccactctgtcataggtgggggatttgagtcttccacctgtgacgatccacatcagccacaaagactacctcctccacacagcagctccgctgggccgcgtgggatactgtgggccctggctgctgcagattaactcaagcccactgtctctcttcctaatcacatggagaatttcaataaaaaggagatcattccagcggcagctgtcggctcgggtgcagtcctggtaattacctccttgtcagaccttgaaatcctcctgcagtccataccacagtgctgagtccatctgaatttatgagttatttgcagagataatgaaagctatcagattacttttcaactacattcaaaatgaaattagccagcaagaagaccattaggcaaagactctcacatccttaaaatagcgggctgaccccccctcctctctacccaggctctccatctagaccgccacaccctttgtttctcattgatgtctcaggacagtgggctggaggagccaccccaatagaggggtccacgtgttgataaatgtgcatgtgtgtacgtatacattacatatacatatgtacatgcactgaacttgaggagccgtaacgttaaatttatgaatatccacgtgtacatgtgtgagcatgtacatacatttgtgcatgtatgtgcatacattatatgtgtgcacgtgtgtcatgtgtgtttgtgtacgcacatacatgtatacatgctttagatgcacatgcgtgtataagggcatgtgtttgtacacgtattgtgtgcacatgcgtgtttatgagtagacatgtttgtggatacatgtatgtgtgtgtgtatatatgaatgtatattataccagtttcttttcttatgtgacaaaatatcttacaacttaaggggggctcaaaactttattttggctcagagtttgagagggagtttagcttatcatggcaggaaggcatggccgcagagccactcagcctgggtggtgcgtggcagagatcttcaaaggtagctgtcaagaaagcagaagcaaccttcaaagtcccagccctcagtgactgcttctgccacccatgtcccaactcctaaaggttccatggcttctgcaaaaagtacagtcagctagggagtaagtgtttaaacacacatgcctatggaggagatttcaaatgtgaaccataacagcaaatatgtgtacgtgcacacgcaagtgtgtgtgtgtgtgtgtgtgtgtgtgtgtgtgtgtgtgtgtgtgtacacatatgtgtataagtataaaaactactcattttgtattttgggagggcaaatttcactttttattccaggctggcttggaacttactctgtagcttaggctgacctgaaactcatggcagtcctcctgcctcagcctcccatgtgctcatttcaggaatgagcctccatgcctagctaacaagctgcttattcaattcaatgggaatgggatttgacatcttcctgctcagtctctctccctctcaacgcccactactgatggtaacatgctggaaaccaacccttgaaaatgaaacaaaaaagctactctgacattaatgttactgtttgtcttcccccgttctttccatttattatctaggggtaatttatgaatgtgtgattctagtcttcttctcaaaagcctcccctactttctaaacaactcgggaaccaagtgacactcaaacctaatgtacctgaggcaggaactgccgcaaattcaccaaactcctgcctgctgtgtcaggtacatacctgaattctgatcaaaagaacccatttccatgtccagctcatccaaactctgcacagaatctcctaagtctgttccttcttgttgctgaacggagagaattctgtagaccttggagacaaagagggctacaagatgggaggagcccgatctgcttgactggaaactcgcaaagaagtcacagataaacctctactgaacttggggtttgccttataccatgcatggccttcatggaggctgaacaaccctgatccacattctggtatctatgctgaggctgaggaggctactcctgcaccacaggggtgtgtgaaagaggctcgctgctcacacaaagaaaactcccaggagagcggggcagggtctcagacaggcttaaaggtggctcagatggcaaagaagatgctggagtttgtttttggtgtgcttaggggtagagccaggcgtggatccccctcacagccaggtttctgtggtttggacttgtagatggtataagagaaaggagagaagagatagtgaggtgacggggcttgaaagctgttggtcatcaaactctccattgttctatagctgggactgccatattcaacatcaaactggccctgttattttcccctaaacaatttatctttccaagaaataggccaaacatatagccacttttagggcccccatgccctactggatggccccacacccatgcgcatatgggtggcactaattgaacttagggagtgttttagtctgcttcctcttgctatgataaaataccatgaccaaaagcaacttggggaggaaagggtttatttaattttacaatccccatgccacattctgtcaccaagggaattcgggcaggaactgagggcagggtcttggaggcatgatctgcagcagagaccatggagaaaggatgcctgctggtttgcttccctctggcttattcaactgcctttcttatatagcctacacctatctgcctgggaatggcaacacccacaataggctgggcctttctatgtcaattatcagttcagaaaaaaatacctcagagacaagggcacaggcctaatctaatcttcaatcttcaattgaagtaccctcttcccaactctagctttgtgttaagttaccaccttacacatgactgggattgttagtaaccaaaaacaggacatgaagttggaagggagaaggagtgacaggcctagggggagctagagggaagtagtagtgggtgaatatgaccaaaatacatctgtataaatgtatattttcaaaaaaatagtacttaaaaaaggaatggctcccaaacccaccaaaatcatcgctttcagtaacgtgcccccctccccagtttccaccttctcatagaagtcttcaaaattatcctttgtatctcttcttccctgggccaattaaacaccccaggaaccatgggctcaggccggaagcctacttcctggagttggatactggacacaaatctaccaactacttgtttgtcatcttggagaatgcattaagtctctgtcacttcagtttcctgattgttaagtaagaatcagtgacagtccctaccccatggagtgactgtgaagatacgatgaattggtgacagccctatgccgcagagtggctgagaggatatgacgaagttcataaaatgttcaggctactcgttggtgcacataagtgttctgtaagtgcttgatctagacacctttgtgatgtgtctcttacctgggtctctgcgatgcttgtaactatctcccaacccagccaccattctagagccagagtagacttttgactatatgtggtggtttgaataggtatgacccccatagaatcatgcatttgaatgcccaaagggagtggtgctgttaggaggtgtggtcttcttgggtgtaggtgtggctttattggaggaagtatgtcactgtggaggtgggctttgaggccttatatgcacaagctatgccccatgtgggacacagttcacttcctgttgcctgcagatcaacatgtacaactctcagctccttctccagcaccatgcctgcctgcatgctgccaagattctcaccatgaccatcacggattaccctccgcaactgtaagccagccactattacatgctttccaactttataaaagttgccatggtcatggtgtctcttcacagcaatagaaagcctaactaagacaccatacaaatttaccatgtttctgaccctttcctatgtttcagtcatattggggcatgctggccctccctcacactaactctagcatctctagtttactccaataaaaaaagggcccagtagaaaaatcagccaaagatacatcctcagcctattggcccctgagaaatacccagacacgatggctgagctagccatgcacagaagctaatgctagccatacacattaagtataaaatgaaagtaaatggtcattcctgaatccaatgataagtaatgcttctggcagaactatccagaataaaataatctcgacaatgtttaaaaactctctctcccatgataagacatgtagttatgtatttactgaagaatttcttctgattgataaccatggaaactagaattggatatggattaccaccaaaaatagaattggtaaggatttcacccttgaataaaagttcagcagactaaaaaagtaccccataataaatttgttagtgtctacccgttgctataagaatttggtattgcaaagcctgactcaggaaatttggacctagtaaaattagtggttccacataaaactcagtggcagaagctgtaattttagaaatctgactaatcttcttcatgaattttgcacagaagataattgatctcagtgaaaataattttaggaaaatgataatggaaagatttggaactgttgtaacgaggctataaattaaaccagctgaacacagttcactacagaaatagctctcttagcaaagttatcaacatgaacaaggttctcatttaaggactgagttttttttttttttaagacattggtaaaatactaaccttggggttaatgtcaaaccacgatatcagaaatatctgtgtcctatgagccaacagtcttatacaggatgagatattctacatgccaaggacagacttgttttttcaaggacaaacttttaaagagcagcaatttgtcttcctctggcccattctctcagagtttccctctaataatctattatttatacatttaatttcttgctctataagcctttgtactgtgtctcttacctgagtctctcctacacttgaaactttctcccaactcagctggcacactaaagccagagcagacatttgaacatacaaatctaccacgtttccggcctttttctaatgctccagtcatattaggacactctggccttccctctgacatcgctactttgctctaacaaaaagtgcccataaaaatttaatttgtgagtgctggagatgaggccacacgctaggcaagtcttcagcccttgggtttattattgaaaatgactgtaggaaaactcctgctgtgactctgttaagaatccctcacatctacactgcatattccacgctataagctgatttcatgtaaatagctatattcagcactcattgtcatccttgcaaaaccattcattagtgtcccgccctcacagctgagtgaactgagactcaaaggctaagaaacatgattgacatcatacagccaaccggaaatggagtctggtccttcccacatcaagaccagtgctcattcaatgatgtcagaattcatagattgtcaaccacacagctctggctgaaatctaagcatattgaaggaatctggtgatggagccaaggtccccatcactcctaatgccttgtgccccggtgtcaactctgaatccccagagtctaccccacctctggctgctctgcagcactgtgggtggagagacgtgtggatggtatttgaatgaacccagactgcatctcattacacacctcgagccttctctctccggcttcccttggggctgagctgatcgaccccctggaaagttgaacatgcacaatgaagggccagagaggaggctaaagtcattctctagaactgcctgtcactctcttcccttccaggatccccatatcagagaactaactcccactgtggacatagtgggagccactgagctcgttactccctggggtgccccacaacagccaactatgcaaatgactccaggccacttgatgacacctggggagttaggcatgagtttcctgtatgttactcctcaaaaaaactgttgtgaccaccagccaagactctctcaagctaacaacatccaaaggccagccctttgctctccctaggttaaggttttctaaactgttctgtgcctgaaagacaatgacagatctgtacctgaaagataatgacagaattctgctagtcactctgggtcaggagggccagctgtctgttcccctagatctaaaagtccatgtttcagtgataggaagcatctagaagattttactgatgaaccagtgttctccatgtacctctctctatctgctactgaacacaagaatgttctggggtacaggacatggtaggcatcctcacatagttgaagcattcttcttccagaagcttctctgtaatagagtagagatgccatgctgtggacacatcacaactctgtgttctcatcaccagaaaacagcaactactccactacttctcagtggatcttctcaagcacagagctgtgagctgaacaagcatctcacagtgaacctgggaagccaaggacccagggactcattccagccttttaatcacagggcccgactctgcagatcgcactgttaactgcatgagctgtaagtctattaaacactcaccactcaacctggtcacccctcaaaccctttagccctcaccccctttggattctgcccctaccatgaagcccagtttttagaccttccattcatgtgttgtacttcctccagtgtgtccaaattcctgacatttttctcaagcccctttcccctggcctgatttaactcttgccctgcattgatcagctgtctttatatgcaaacaatggcatggtttgaccttccttacctgtggaactgaaagtcaatgttgaggttcccaggaaccaacccagagtggcacatgtcttcaatgcaaaatacaatctgtgctctgttccttatagtcagacagggtgagtgccagggctgctgctgagtcttactggtaagttttgcgctagacttacaacattgtcaagttctggcttttgggacttggttgtttcaattcagtcttgaaatactgcttaaggacaaaggctggttacttcaggtgcagcgttccacaaatggggctctgaccctcctgcaggaatcctccactcttggagagggcttgatctgttttgtggaacttagaaagtgacctcaactttgagggtcatttcccactcagctataggaatgcagaattgcaccctaagactttccagaaagggcagtagatgggcagaatccctcagtcagagccttttgcagtatcaggctgtcttcactgcaggaatccaagcccaccatcccggacgtgggccaatggctgtctcattacggtttactgtgggcctggcatttaattgggttctcattctctttccttcgagtgtcctggaatagacacacatcatcctgctgcaaaggtgacaacgtttttgtgatgtgacaagcatttctgaaaaggacaagggtttactgttcacacttctggtgatgtttgaacagagacttggcgctggcatttaagtccctcttgctggtttctcaggtagtcaaattccagagaacataatagagtctaagaccactgggtctccaaatcacaaggcagttgtctcccctgggggtaaagtatagagactgcatgaaagagacttgtaagtagagagagcaaatcccagaatcagctaagatgaaggagcaacagtaagggggcttattttatgcaccaagtacaagattgggtaccttacacagctctctttccgatggtttggaccacccagtgaagcaggtggatgcctattatgagtgactgtccttgcaggcaagccactgccatcttggggagctcagctgagcgaccttgcaatgggggcgtatcccagctgggcttgttgtttatatcccttcatggacatggaggagggtcaagaggctctcacctgccatccagctgctctctgacacccattgtatgcaatgctgccttaattgcacttgccctgggggaggaactagacagattagctagctgagatgtggctgattttagctccaccccactccctacagtgctgggcaccttaaataactgccttcctgcttctgaacttgatttctttttaaatcaagtctcactgtgtagcccaggtggtctcaaactcgtgattctcctactcctgcctcagagggctgggattctaagcatgtgacatcatacctgacttatagtttggacatttagcgtctcctaaaggtccccagagtggcaccactgggaagtggtagaacctttgaagaggctctgacaccccatatcttcctgtttcttaactttccatcatgtgccaccataagcctaacagcatggatagggccaaataaccacggacagaaacttctaaacccaggagacaaaaataactctctttgtaagctggtagctgtctgtcgaattgtcggaaagctggatgacaacccccacacgatttcaagtggacaacagtagtgtatcactggtgtcacagccagagcagatgacaggcctggtcacgaagacagtgccaccaggcacccagacccgaaacccaccagccatggtatatccaacgctgtgttgaagatgcagctgccgtcaccttggttactggctccctcaatgtggccacacaactgtgccagagtggagaccagggggcactaataagtaagtgctcaactcacactcagatgggcgtgtcaaattctgtgatgtaaacgcttccatcacgggcaacttccagttactgatgaatggcatcggtgaacttgaggctggaagaatgagcaggagcacacaatatttctaccacacatgtgacagccagaacttaaagagcacacagaatattaaatgtctgctaggaagtgggcttgtgactacacctctgtgtcttctgggtaatcaatccaagcttgcataactttgcttttatcagtggctgcacttaacagttgcttcctgtaagccataatgagccacctcaaacacacagctcactggaaaaggaggaaacgtggtggtcacgtggtagccaagggtccaagttcaagacctagagaagcctttctagggcatccggggatgctggtcagggaagaactgcgtgggccgtgggagatggcagggatggtcacatagtggtcgaagtcttgaagctgtcgtctgtgtggctgtttctggatcataagcagcaactgagacccaacgcccaattcctactgaggtcttcctgtactgacagagctgtgaagaatgggctgggcattcccatcctgtcatatgcagttctctgtgaggaaataatattcttcccaaacagggtccctacttttccccgggaatacccaccaggtgtgtcctgaagaagccctgccttgcttagctccacctcccaggtagagtcctgtcggaagagcaatctggaatccacccctccttgctcacctcccctgattcactttggagcagaagcagcctgggagatggctggtttggctctaaggaacaggggaaggttctacagagtcacatgccagagcacagtgtggaacagaacagcccaagtccccccaaaagaaagggctataaactggatctgcgtgataacagtgtgagtgcaattaattgttgtcaaagcattttgctggctgcattcatctcttatgtgggagaataaaactgtcataatgatgacaattttattcaacattggtgcaattaccaagcctaaaaacagggagcagagggggtatttttcttgagactgagctgttacccctgttgcatggctgggactgtcactgccaccccctacccccacccgcaggaaggagagagaacaggaagaaaactgagacgcactgagcattgctactatgagccacatctagttttgtttttttttttttttctacataatcctttgggagggaggggaagtgtggggaggagagagggccagtgtggggaggatcaatgagatttcctggctcaagactgcagagacaggctcacagttgacaccactcccatgggaggcagtatgcaccccctgtgatagatgagaaagtggggcctcagaaaagttaagcaccaccaagtcaccaccccgtcttcctgatggcagtcaggcaccgcaggttgcttgccgtgagacacgtgagacacgtgaggcggccgctcagatcctatcctgtccgtcgtctctccctttcttctctcttcatcacatcccatcacccttcccacactgcttcactcttttgaggatgcaaaagcatcaaggccccagaagcaaaaagacttgggttggcaacttggcaagtgtgactttggcttgggtccttgacctctgtaagttgtgtaccacggctttcaactatgaccgtgaagacagtcatagtaccatggtgaggactgaatgagatgtgtatggaatgggtggcatgaagctgggcattgggtagcggggcagaatttcctacataatcaccattaccaggcacagcagacgtgaagtcacaccatcttcacagcaagctagggcggagcctgacattcttctttcaccttagtgaagggtgaccttatgtgacactctgccatccaggtcacacagcacagccacacagggctacagcagggaaacagagccctttttccaggtcagctcaggcacaggctacacccctgaagccccctgacctatgcttggtacatgtgttttatcttgctcaacaaaaacatttcctttggattcttgagactctgggaaatttgaggcatttctcctgccttgctctctttttcctttcacggggcacacaatgagagacaaagttagccatgcaagcaaaatcacgtgggaagaagcccgaatggttttaaagccactcctctgagcagctgtgcgtgtcttcaggcagctcctctcatttgcccaggcacctggcacacacctgcactgctccatcaagagcccatctggcttatttttaccatcaggaacatgagcttctcctgggggactgaaaatgtgctgtaactcccacgagatcactggacttccttcccagtcacagttggtggcagggggaaagtttggaaggcttttctttcataaaggtaagaactgcccaagaggcaccggcagcttttaaagcttttaatggactaagggaagaattgttcacctcctttaaagaaacccacgccccaggcacgtcctctaaagctctgggccttaagatcttttctcataaaagtcaacgctagccattgaacttaccaggaccccgagctacaggggtgacagaaagggcatgttctcttaagtcagacatcaggttcaaaggcaaatcttcaaagtcccctctcttgaaaaccgagaaaacaactggattttgtggaggattcaatgtgctaggaagtagtctggaatgtaaagccctggagttatgaatttcccaattccacattaaccatctttgatatcagtgtctcctatcaaaagctactgcgagcccttttggaagaaggtgacgtatgaaacaaactcatcctgagaggcacacagaccccttccttatcctctccatgtcagctgctgtttttgcaagatgatgatggagttagctttgtacctgtcacccagacgccacgcttgctggctataactagatatcctgggaatggtacccacatgaggccatgcagccccaacaagctatgcagcagtaacaagggctctggccaaggaaagcattctcccaaacccctactgcaaagactgattttatattgctggcccctcagggaagctgcattttgttttcgttcttccttgtgaatcttatttttttctccctattttgttttctgcacaatttttagaaacatggtgtcattttgaaactgctttttctacctactagtttgccagccatatggagacacacccagccccggatgggttgaaatgaaagagccggtaaggtgagccactgaagttgtcgctgcattttaaacatagcacacaatgtgttacacaaacaccattcaaaaacctgagtcacagattcagatgggagcatatataaatagcgtgtgtgtgtgtgtgtgtgtgtgcgcgtgtgtgcgtgcgtgcgtgcgtgcgtgtgtgtgtgtgtgtgtgtgtgtgtgtgtgcgcgtgtgtgtgtgtgtgtgccgtgtgtgtgtgtgtgtgcgcgtgtgtgtgtgtgtgtgtgcgtgcgtgcgtgcgtgcgtgcgtgtgtgtgtgtgtgtaatggtagaaaagcaaggaagtttgaggaatcaggtcaaaaacctcagccttgtcactatttacaccccctcatacgactcccacccaaaaatggagcaaaagccaagtggaaaattgaaataagcggatgtccccacattgaactgaacaacacaaaggctgtgtggcatcaattgaagtgataattacgttgtcttacttcctggctgtccatacccacacacagtgcagctctctgtttctgggcttcaaactgttttgagggtttgttttttaggttttggctcatgccagccagtttattggcatgtcaagactctgacagatttttggtgcagtgacaaaatacatcttgggatggtgaagaactcacacctgggacatgttgcaaacattttaaaaatccattttctcacactcccctccccagttcacgttgggcacaacttgctgccaacacgttgccccacacccagctcaggaagtcactgctcaggctcttggacacaaacagagcctaaaaatgacatgacagcaggctcagggcagaccctgaagctttggccttgcactgaacaaagcatgaggccagaggtctggaaaaaagctaacatgagtcttgggcagcccgtggtgtccgtgaggatctcaatcatctctgaagacccagccttggccctgagtcactctgtcccttggttggtaccttccagcttccagcctcattcccaccatcaaggcaggcactccatgtgaacttgcaaggtactgctgttcagcaaagtggatgaaggaagcaacaactgcatctccaaaggctgagtgttgcatcagctataagctggcacccctcacacagaagggctctgcatccatgtgagatgtggacggcaaagacagcgatatacacagcaacaacagacacacatgggtgacacggccctgctgctgtgtgactccagttccttccattcagtctctgccaagctgggtgtctccatcatccccgtctggtccttctctagccacagccacagtggttccccagcctcggcctctccatcagcagagtctgagttaggagctcactaaggtgtagatcatgctgaatgcaaacagaaatgggaaaacagatgtcagcaggagcccgtgactctcaacagtccccttccaaagctggagcccatggattcacctcagtcctgtctctatggtctccgactcacctactgaggctttgctaaaccccacgatgcagaagtgttgtctgttagaaaggcatctcgaatcctgcgtcccgaatcccgcatgaaagatgtgttgtctctggatgcctgtgagtacactcattgggatgaccactgtggccaggtgcctacgggtgcgggcagagcagactcctcataccatcagctgctgccatgtgctcacatgatggctcactatgtagagtccccgggtgatgctacatagtgtgccagctccaagggtcaggatgaagaccactgtcaccaatgccagtggggtgcatgaacacagtcctcagggcaaataatgtcagccaatctgaactcggtataggtccccaaacctcctgcttgaggggatgagtagtgaccaagtaggggcctaacaagggtttcaggctaattttgcaagactgatgtgttgaccagaactacagtctactgctttgtctatttagaagaggaagatgcacggctttttccattagagacccctcccctaactctaacatgatatccaagaagcaaaagcaaataaaaagacctaaagtattttcctcctaatcctgcacagctgggaaaccacagggatcctctgaagtctcccatgtagagcatgtgccaggccccactggttggatttggagctcaacagatagattctcactgtacagctcatgacagatcaaccacattctaactccaaagccattcctctgtccattgtggactgagccaaattgtggagaaccctggttaactcactgtaattctttttacttggtattcactgaacacctactatgtaccaagcaccactctcggtgcagggaaataatggtgagtgcatagtttggaccctgaccatgaaggaacatgcagccaagctgtgacaacaaacatcatagatttagtgaatgcctactatgtgctgtgctctgggcagagcactgtagagatagagaagaagggaacagatgagttctctgccatctggagacaagtgacccatcaacaacctaagtatagactgagaggaaacagccaaggcaagactaggacggcccaaagggatggaatgatgcagcttcggcgaatagcgtgggccagcattacactcagaacccttctagccaggtccggtggtgcctgggatcctggcttcacagtagactgaggctgaaggttcaaggttaagggtagcctgggcgattcagcaaaactcggactcaagtagaaaaagagctgagggcacataacttggtggtagattgcttgtctagcatggctgggaccctaggtttgctctccaggacaaggaaagaggacagaagaggagaggaaaggtggggtggggggggagaggaagggaaagggaatggggagaggatagataaagggtggggggcaaaggaaagggaggaggatgcaaagtggaaggagagagagagagattaaaaagtcctcctactgagtaggcaaaccgtgtacactggactcaccagttgactgtagcctcatctctgtcacacataatccataaatatcacccgcaccacagggcattccaagaagggacagtggtgggagccacatggccagcagagtgcagtagatcagggctcattatttgggcttggagacatttcttaacctctctgaggcctcactgtccagtggtccttagcttctatttcagtttcagcatctccagctccacactcagctcagagcctgccctgcatggacctcccctcccttcacatggcccagatgaacgctctgcaatctgccagttctccatctgggtttgggaattccccaggtggaagacacagggtcttctgggagacatggggggcactttgatgttgggtgtggtgaagaatgaggccccctgagttagtgcatgggcttcaggaaggtggagaactgtgctttgaagacaaagctgtgagcttgctgtatgcatgccatggcaaactgcagctgagactaggaggcagaaagttcaatggcctatgagggacttatagaatgattgctcccagataaaggcccagagccaccaacattttccatgctaaccctcctgccctgtggcccagcagacagcagtgttgctttctgggaattcctctctacctttggctctaacagctcacacccacaatgaatgctttagtctcccaaagtaagatggatctcaggataatgggccaggagccagggaaggcctaagccatgttctgctgctatctggggacaggccactcagcctatgactgcaggtggcttatagcctcgtgaagaaagtgaggccaaactcactccagagaagaaactgcacctgaaaacccgccaaggagtggcctctgccttcagacaagctttgtgcaccctctgtagcctcctgggagagcaggaagctagagtggctaagcccttagccaaaaggacttggatgagctgctggtcacctcagtttctccaaggaggctccaggggccctctgacttctacagcttggagcaggaagcatcaagaccctcatgaaggataaaactctgaggctggagtaacccttgacttcatgaagaaagcactagactaactctgtgacaccctccccacaactcctcacagctgaggtgaaccatgaggccacacctcccaggcctctgtatgtgccgatcctggagactgaggtgggaagcaggagcaaaacagccttctagtgttccgggttcagacacatggagcagagtagtgtggagctcatgcaaagtgtaggactcgggacagtagatctatttctcaaaggcctgggagccatcagctaactgtgctatagccagccgcttgtctatcccctggccctcactttgaaaaagacttgcttaggattctctactcagtttgaagtttggcctctgagtcatacttagtgtgaccattggctgtgaccttggcaaatgtttctaccttcacagatccgtgttcctcactggaaatatgtgggtaaggacagaccgtatctcatacatttgtcaatgcatacggagtttgttctggaatgttgggtaatgtaactccacagcctgctacacccaggctgaacccagggacagctgtgaggttagcaccctcaccctcctctgtgtctgcagagacagcactggggtattcggggacatctgtgaccctgagaaagtagggacaggacagcaaggtgatcaggaaaaggccctggaaatgagtacaaaagggagcaggagacatttccagaacaaggagcctcgggatgatggctcacagagctctgctgagctagggcattcaactgatgaggtgacgagagggacccggaagcagagctgcaaagtcggcaggatttgctcaattaggacggtgttatgaaacacagaagaattgcagcataagcacttaatgacccaatgtgccactctgcggggtgtgactgccactggagagagaaaggccactgttacagaacccaagaaccttcccaagcaggctgagggcaaggggtaatgaggctggcaccctcagttcactgacaccacaatgggctgagctgctgtgctctcaagggcaggaagccctgctgggaagaagccctggacagttcttcagccgcctcctacgagatgttattagatgtttccctgagctgttaaggatgtgaacaaaggcatcttccttccccagaaacccttgctcctgagtcaaggttagacaaatgggaccagattcaactggccaagatctcctgtcatcggcaacctccccaaaagctacctcttcaaggccagcctgaaatcccttccctttgctgctgaggccaaagggggggggggtgagggaaggcgggcaagactcaccagtagagataatagaagaaggacaggaggtagaaggccagcttacaccaggcctccttctgacagtagctcaaggtgtccgcgttcatgacaactggtgggtcgtaggctagttctgagctatctgctggacagtggaagtacctgcaggaaagaggacatggcagtggcgtctctgaggctcagggctccccacactgtcaggccaaagccacctagcatcgggcttttccgtgaaaacctgtgcctcctgccaaagtcagattccaactgttgctatagtgcaactcagccgcaaccttctgctgggtgtttaagtcctccaacagatcccggggatcataagaaggtgctctggcagaaggaaacatgtcacccagtattatggtctggatgtgaactctcccccataggcttgtgtgggggtgcactctgtaccaagctagtagccctgtttggctggacaggagagacagagtatgaaacctttaggaggtagggcttcactggaggaagtgaagaaattataggacagccccacttcctgtcccagctttctgcttccatcttccaaggtgtaacaataacactgcaagttcctgttgccccagccaccatgccttcaccgccatggcaggctgtatccccttaaactatacgcccaaataatgccttcctgcttgggttgattctgatagcctggtaaccctgggagtaaccaagagctccctttggatatagaaatgtctggaagaactgtgtcacctcttcctctgtgtctacactctaccttgaatactaagtgccttgggctattgccccctccccaggctctcatttaaactcctgaacaccacagacacattatagagtcatttttaagggtattggttgttttgttgttgtttgtttgtttgatagaagggcccagaagagcaaacagagcattggctatctttggggaagccaggagtgagaactgtaggcagaggagtcctcatcaaaggccacagccatatcaaccccacagctcccatgacaactggggctcttgtcagtgtctgcagttcttagttcgtgttcccctgacatcggcagggcatatcttccctgtggaggccaagatcccagcgcagctggaatggtccagtgctgttctttggtcctagtgggaaaggatcctgggaggcaggggtacagactgcccctccagccagacctggaacagtagcagttctccatcctgagggagccccaggcctgggcctgacctgaagactgccatgagagcacacacctgcagagcaggcatctcagtcatctcttccttccccttcagagaattgcactgacattatctgtcaccggcactatgctaagaggacatcagaagccagattcgatgacagctgccagctcatagcccttgggccactcacctctcctcttctctggagcagatttcaaacctatttgccgtcacagtggctttgttcccaggtgacctcattaagtggtggaagaggaaccgggtgaccaaatggctctatggaaaggactaagactgactcttttgcttgctgctcaccagattgtcctccctgggtcagtcaccaacccatcctaggctcagccgtaaaatgaggatgaaaattgggatgctgatgtaaggtgatggatgcaaatggcctccccaaacagccactggaaagtggtggccaggccagtttgactgaagctaagtgagtgtgagggtagtcctgtctggtggcaggaatccgacagaaagggggcaggtaggccaaggctattcgttctgactgtaacatgctgcaagccgaggactcggtccagctcccaaaactcagttaaagagtaggtgttgctgggcatggtgacgtgaggctgtaatttcagagctggagatgtcaagacgtgctccttgggggtcacaggccagccagcctagcctacttaagtgagtttcaggccaccaagagactttgactgctcctgcccccacccccaaggtagatggtaatacatgaggagctgctctggaggttgtcatctgaactcttcacacatgttcatatacatgtgtctgtatatacataaacacacgggggggggtgacagagaaaacaaagagagagaaagggggtgttctaggactctgggtatttaagtacatccgtcttcatgctgtctgtcttttgtgatctgataacgtcctaagagtaaataggctaccagggatcccaaaaccaagacaaggtctttacaggcaatgagaccatggctgctccctacattccaggtgtggggacaatggccagctctccttttcctcccttgggacaagtgctagctctaagaatagagcacaaagccagcgttcacaagttgattgcctctactttggcggggctggaggtagaacccaaggctgcgtatacagcaagcacatgacttatccctgggccacttccccagacactgaccatcacttaaagactctccagagaaatttcttttgtagggaggagatccagcctgggaccgcatgtgaggtggaggggacacagatggctctcacagatgaggtcagccatcaccctcatggccatctagctcaggcattccctctccctcacctacaaccaaccagtggccaaagcctgctcagtttacttccaaagttctgttctcttgctgggccaggacccatctccattatctggccccctggaattttgtcatgctcctaattagatttggacttccatacacctctgctggcccatgcttcacactccgccaggatcaccttccaaagaaatgccactttcttcctccagaagttctcacggtttccagtccccgcaagaccctcgctctccaccaactctgcttggactctccatatgagattcccagctgctcgctaactgcaccctccaggagcccccatccaaccatgcagaaggataaaaattgtcccccaaacatgccgagtgcactctcacttttgggcttttgtacatgcttttctggatttttctacacttttcagactaacttaagtgtttcttccactacattcctacacgtcatcctcatatgtctgtcattccttctgctgctaaaatgtacctaggataaagattcatacatattttcatctaggaattcccctcaatgcctagcaagcagtgctctatacctttgctggtgacagagtggaatgttctaggtgtggataactcaaggctatgttttatgggaaagtggcaatgacggaccaactggcttagggggtccagagctctgagatgaaagggtttgaggaaggcaactgatccacacaattgcaatctccacttgcccggcatttccgacctctgctccatatccatcctataggaaacccacaccgtgtgatccaaagcccagtcttagaggagaagagcatatttaacctcatgaagtttgttcttttgacgtgtatacgcaattcgctgagttttcctgtatttatggagctgtacatcgatcaccactaactccagagcattttcactacactagccctgaaaaagaaattacctactgtcagtcatttcctgttcccctcagcctttggaaagtactagtttactttaaatctctatggatctgactatcctggaaatttcatatcaacagactcatttaatgtgtgatcattgggtgtgatatcttttactatgctttctttgtggcccatccatactgtcgcatgtttaagtactttgtgtctttttcactaccaaataatgtgaatggatacgccacattttctttacccatccaacacctaataggcatcaatgttgtttccatgtgttggatacagtgagtgatgttgtggctgcttttcacactaacctgcaggattgaggttgactaacagagtcaagaggacttacttccagctctgcagagtaaatttgctctacatatctttgtttaccaatttgacacaacctatggtcatctcagaggagaaccttcaccaaggaactacccagatcatactgacctatgggtgtatctatgagagactgtgttgactgttgactgatgcaggagggcccagcccatagtaggcaagcggtaccattccctggtccaggtggtcctgagttctgtaagagagctagctaaacatgagtctgccagtgagccagcaaaaccagtcttccgttgtttctgccttcaagcttctgcttgagtttctaccactcaataatgttccttccctaaagtgcctttggtcagagtgtttaatcacaaaaggactgtatatctataacaaggtttctaaaaggaagggatgaaaggaaggcacctagtagctgatgtatctgggcatacggccattgggtgggaaagtgaaggaggaaggaccagtcccagacagacctacctccagaagtgatagaaaagcagcggcacattcagccccagggtgagccactcctgagcacacaggaacatgatgcagaaaaggctgtggatagagtactctggcagcaccagctggagaggaagcagagacacacacaggcctgattagaggcgctccacccaccgccgcctcccatgcaaaggtctaccctgcagcacgctcacttccctgtgactgaccattctggggaaatgttccgtgtttcagacccaatcccaagcagacacaagccctctgttcttgcctggggaacaagggaggaggttactcagcatcgaggctgtctgggaaaactaggagtttctctatcacctgccaccttcctggctctgtgtttctggcttctctgtgccctcctctagctaataggtgtgtttattcacaatacaggaaggttaggagttcctaatttagaaaggcaatggctgatgatgggcagaccaagaagaacccgagagaaacgtcaagtagcagtggtgaagacaggtagcctctatgtgaagggagagagacgatctcagactcagagggaccatatggcagagggacacctctcttgggtgtgtacatgtggcataaatgagcagtgtaagctaaagataactagaaggtgggaattcaaccccttccagtacagaaagctatggttatgcaaacacactcatgtaggcaggacacacatacacacacaagcatgcatgtgcatggcctgtgcatctctcttagaccatcacaaatgttctagtcttccaacaaactctgcctttcaaaggccatctcaaacttgtttctaaaggaatccctacccatcgtctcctgcacctctcatccctcccacacctgaccccttttataaacttacataaaaaaaacactgaagttttaagtcactgactgtagttcttgacggcaaaaaaagaatagtgtgtgtgtgtgtgtgtgcacgtgtgtgtgtgtgcacatgtgcacgtgatttgaatcaatccacttgggtacagaacatgactttagcctttcactgtaggcagatgagctacctgaccagttggcccttgaagaagacaaggacatattcacatattaaaaacaaatgcacatacaggcacacatgtgagaaatgtattttataattggagtctctctttgtcatcagcatctggtggagtgaggtgcgttaaacttaagtgaatccgtgagcactgtctctccagggtcatgacttcagggggtgaaccaggcactgcctgcacctatgaatctcaaccctgtggcaggaggaggcacgtcccatcatttctccttagaggacctcaaagttgtccttgccagcttcatctgtccccagcagggcattgcccagatgcctcccatgcatggagaaagcccacgttcttggagctagcatgccagccctgctctgcctcatgcagcatctctacattccaagaacttatgccaagtaattaacatgtttagagacagccactctgggcctgaatcattcattacagctctattcccgtctccaatgccaatgacaaacctctgaatgatgacagttcagaatccatgtcccacgatcaatcacactgctcctctttctttgggacttgattgatagtggaagccgtgacaagcagggagtgtatatcactaatccccgtgtgggggaagctacttaaccaaggccagctcgccttttaggggtgaggagaaaagctaacaaacttctgctatcctgaatggctcttccgactgcccctgagcatctaaaacactgggcaggctcctctccttaaccccaggagacttcccatggcagcaatgtccttgtggtatacttattgtccctcctattctccaggcatcccttgtcacactgatatggacagtggaaggaccttactcctcccagaccagatggggcttaggcaggtcacctgcactggtcagcaccagggcccctctgcaccaactctcctttccactacttggccttcggagcataagacattatgtcccagatcccagcagttgggaggggccgcaagggctgtgagtgggaactatatgagaaggctgaacgcttaacagccaaagaaaaatgccccaaagtcctattttgttctccctgacgttgcaaagaacagttacaacaatgggtacactccattatcctgacaccacaagtaaggagcgaggcccctgggcaacctgtgatgagtggagtgagaacaaaacataaacttttgttgttctgagctactgagagtcatatgttgcttctcactgcaacacactttgatccatcctgtctgatatagtcagagccccgggatgaaaaatcaatgagaaaagcaaggctgtgttattcttccctcttcatcctctctgcccatccttccaggtctttgtttaataagccactgaggacacggtgacatgctcctgtcactgggcatgtggcgcaccggggcaaaaggccaacaggtaggcagaatgcttgttcagtctggtgtgcagccagctgggtggctccctcccagctcagacagaatgagtgctagaggaagatgccccacccctgaacctatcagagaaagtgcataaaagttgactgaaactctgaccacacccctggccagcatcatcccttagcatcgacagataccatttcctgtaacggaactgttgaatggcaccaatccctgtgattcactgaatgaattataaataggaaccacttcattcagtccacagcctgccgagaccccatgccctgctttcctgtggttataaatagtaagagtggtcttgatatagacatggaaggattgctgaaaagatggcagctcaagccagcatttcctacacacacctatgaccccaggctaagggagcaggctacatggtgagatctggtctaaaaaaaaaaaaaaaaaaaaaaaaaaattctaacaagcaaaagacggcaatgcatgccaactggggaatgactggggctttgtgatcaaggcaggaccaaacactgttggaaacgaagaatagacctaactatgtatggaaaccagaagtcagcatttagatggcagggcttgcaaaactgaacacggggctgaggagattgctcaggggttatagcacttgccacacacatgcacacagtatgcatggtggcccacctgtaattgcagcctcagaagcaggtaacaagagatcttcagaacaagctagcaggaccaaccataaaggacaggatctgggcttaattgaaagatcctgcctcaatgatgaagaaagaagagtgattggggacaatctccaccatcaaccttgcctcaacatactcgtgcatacatgtgtacccacacacacttgcccacacatatgcaaacacatgtacacatgcactacacacacacacacacacacacacacacacacacaacagaacaagaagaatcaacaacaacgaaacaaagaagacactgccgtggctctttcacaagccaccaaaagggccgctcatttatcagagtttgggtcaggcctggtgccaggttaagcctggagtacctgccaagcctgttccacttctgacttcctgcccagattttagtagtcagtttccatcgtctggcaagcatccccatctggatgatcctgggccactttgaactaaatcctcccatcctccctgcaaacattctctccggagcctctagcttgacccaacaccctgcctctgtgcgtcctcctcccatcagccctcatggggactctttccaaatctgatatcacatttctacagggacgctcagatctgctcttgctttttatttctactgccccctgcatgcctaggcctctgtccttccccccaaagctactatgagaacctctagcagagttctgtcccaggggcaggatccctctgcctagaagagctaagtctgtctccatgtatggccagatctaagctttcatccatccacagtctggctttcccaggaattttaaaaattatattcattcttatatgccaaaatatgtgtagctttattggtgattaaaataaagtattaaatacttggttttatcaatctcaagcatttaaaatatgttgtatacaatcaataccaaaacagaatagagttataatatttaaaacactttgctttctatttttttctgtgattaaatttgctcttagataacttcacacacagtactagaatctggaagagaagaaatcattgtctccaataaaactctcttttaaagaagatttaaatttatttttacttgtgataatagtattttctctccgacaccccagcttctcactccttcatgcacccacccattggttgccaggatgtggttgttggtaagcttatgcgtcttggaagaataatgccatgtgacaattttagggttctcctcgatgtgctggtagaatgaacagtggtatgggaggagagacttttcttagcctcacaggaagaggaagtggggagcacatggctataccctatactggaagtgcaggaatgatgctttggaaatggagcaaatggtgagacataagcagtcaaccattagtcccaagagggtaggatttccgggaggagaagtatacacatgtatacatatgtgtgtgcgttcaggtttgtgcctctgtgtgtatgtatgcatgcaggggccggatgagcacattggtgtcctctatcacgcttccctgtataccctgagacaaactctctcactgagccttgagcttgccttgctttccttcttccagctgggctggcaggcagtaatccacagcaatcctcctgtctctgccctagcagtgctggggtgacagttgtacatgaccatccccactccaactttttctgtgcttgctgaagctctgaactcaggccctcctcacgcttgcctggcaagcactcccatctactgagccatctccccatgctggggaccagatctctaaaaggaacaaacacagtctacggtcacggaaggcccacacccacggaaggccatggccacagaagatctgggcatgagcttagctggaagactgtagaggctgagaggctcatgggccccagctctgaatgtgtcctgtcagctcagacaacaagctttctggctacagtcacactgggctgcaatgatgagcatcatgtaaattcctccctgttacataaagatcaaccatgtgatgtgaagaaccgcagctaaccacgcaatttcccttaggcgccacacctgctggtgagggatacaggctggactgtgaaggacggtgctctcagaggtgagccagcatcgagcagaggacgatgtcgctccagcaatgaacatgctcttcacattgtgaataaacaaacacatcctggaaaatcacctacttgggaagtaacttgaccttctgttctgaaagtcaacgaaacagcccacagccagatttggcttcctagttctcaagctagttctcctcagtcttctccaactgatgccaccttccaacccccccgagtgggaagacaaacaagccaagggctgcttagtggcctgcatctcaaaccacaaagtggcagtcctgtctgtgtccccggtaatccagttcttgtgtgtctgccagtgcatgtgacccgagaacagaagccctcctgggctacacagaatcaaggtgactttcttacacacctgctgcacggagtccatccctgtgttctcaaatgagcaattgtttgcagaagcccagggctctcattgacttacctgagcaaggggacagcaggatggcattaaggtttgaatgtcccccagaggactgtgttaaaggcctgatccctagggtggtgctatttggagagcaggaacctagagggaggtcttagtatgactggaggtgtgctcttgaaatggctcacgggactctcttttgcttcctggctgtgaggtgagtagttttgctctgtcaatacctgttgtgatgtgctgcctcatcacagaccccagactgatagggacaatcagtgaaagaccagaaccttcaagtgcttcctcataagctgatcatggcaagtgttttgtggtggagatgggtgctcagcaagaaggccagcgtggctaggaaactaggatttgctgaactgcaagactaggctagaagtgtctctgagcattgtcacttcactttgaaactgtctgctctgaagaggccacttctaggtgattactccaagtgactgatgccttgcagagggcatttgagcctagggagggcagtccagcctttatccctgtcacctcgagaactaggatcccagcctcagacagtgtgggggaatcggttgcggagacctgcacttgagctgacttgagttttgtctattagagaaagctgacttgttaaatcttttgaccccctgcaatctgcatgaaggtttgccaactatttttaatggtaagtcagtgtctctaagcaacccagcacagagctgcagtctggaattataatcgtcaatttgatctgcacccgcagctacaggtgtggctcggggcccatcgcttccagaagctctcctgaatgcccacatcaagtattgctttgatgttggccaccgaagccaaaatcagacctgcatggctgacctctgaagaaggggacaatcttcaaggaaaactgtcatcatcctcccccaccccgaccccaccctgccctgttcctctgaaccaggaatatgacagggaaacgtggcaaaggcaagggatgttgtttctcaggacctgaagacaagaatatgcctcctttgtggatgcccaatggtcatgacaggtttgaagattctggatgctctttggggtttagagggtcctcctcttcctgataggctttttggacctctattcctccaccacccagagccctgggtgtggcctgaccctttgggtgtgtcatgccccttgggttctgcttccagcctaatggctctgactgacttgggcacctccagtcccactgccaacccccttgggcccttcactgctgctgttgccatgcactgaacacactggtcagctatagaatgcttatttcccaggctgctggctgaggatggtctcctgtcccggcccatgagaaaaagcacacatttcctccccagagtactcaggtggaacaggggtagtggctttggtgctagggaggcaatgggggatgaggtgacaggatagacttgcctcggtgtcaggcacgcctggtcctaccctgacaaaatgggtcacttttctgtgagcttcagcagccctcgatggtccccaggttttacatgattcagaatcatctggaggttttgctaaaatgggggcggggtctgggctgcctccttcccctcacacctgagcttcagatccagcagtcctggggtgaggcaggatgctgagctctggctaacaagttctccatgcgccatgaggatgttgctccgtgtgtgctctctggtccagcacaccccccggcacttggcagcttgttagaaacatagaatttgggtcccatcccagatctgctggagcagaacctgccttggaagggtcccaggtggtgtatgcacagcaaggtttgaaaagcacttctaacactggttctcaaaatagccttgagccgcctgggaacagcatgcggacttgttataagtgcagatctccgggtcccaccctagagcccagggcagacactggacagacagaatctgtagttcagacacttctgaggagatttttggcttaaaccaaggttacccctcaaaggtcttaccaaaccaccccccaaccagtcctccagtggggtggaaggctcattcctccagcacttcactgggacagaccgagcactcagaaccctcgaaccacttgctgcttgagggctggggtctggtggggagcatgtgctgtcaggagcaagtgagtctagccccaggctctctctctagcactgctgtgagagaggaccccaaggtatccccagcccaaggcttccccaacccaaggcttcccctgcacaagcctggtggcatctgcttggtatggaagtaagggccccgccccacccccatctccagaattctgcctcagattcccactgtattcttcctgtgctctgcaggccacctcttctctccctcaccctctcaagcaatgtacacctgtctctgtttcactgggaactttctagacaagataggtgactggttccttttaggaccaaactttggactctggccaggctttgccctctccttcaagcctacaggggtctgactttttgcatgcagtgacaagacatgctttaaattcagtagccctcttgccagcttccttacacacttgccgagagactggcccaccaagagccacgcagggggaggtgagagctggagcagtccctcacacagcaccacatttccaaaggaagcctgctggcaattcagacagctgaagttagcacttgtagctagctagctgcccactctttaaaaaaaaaaaaatctaagctggggatgaggggaagaggaatttcgtccatactggaggaaactgccaggaaatgtttctgactgtgtgaacggaagggcaggaaccaaggggaatgttctagaatacagtgagcctaagttctaatgtggaagggccccaagttggacctgctcatactatagcataccatcggggacagggcaatatgaagacagcattgtctgcaaataagaaaagtggaaactcagagacaaacaggccacccagaaacagcatgactggggggggggagaaaaaaaaaactcgcacaggagaaaaggagctgggtactgggaggagacagcctgaatcagggttacagggctgattttctccagaagcaaagggtgtccttccactgagatgggagagataagcactggtttctgggtcccagagaggagctctgtcccatcgtgcaggctgacacccacaaatcctccttggtagaaatccttcagctgacctcttctcaaacacgaagacttccaggaaatcattgcaaccactgcacctggccaggggggatgcttggtgacagggcagaaccacgcacaggagttctctgccgcatctgcttttgcttattcattcattcattcattcattcattcattcattcatttcggtttttcgagacagggtttctctgtgtagctttggaggctgtcctggcgctcgctttggagaccagcctggcctcgaactcatagagatccacctgcctctgcatcccgagtgctgggattaaaggcgtgcaccaccaacgcccggcctgcttatttatttatattccagttcgtgcatgtggaggtcagaaagcaatttcgtggagttctggggaattgaacttaggctgtcaggcctgcatggcaagcagcttcactcactgagccatctctccagcccctccttccacccacgtttacactgcatggtagatgatgcttgagactccctggactcacctgcctgcagcttgctagtgaactaagccacacccaccatcctaccctccttccggctgcctcctagtccacaaaggaagaagcccagcatgaggggaaagagtgtcaaactgtcaccacaagctccctgtccagtcttcctccaaatgaggtttctgaagcagggccattacccacacataatgcttcaagtatttgccttaacaaagctgcctggtcttcaacagcaccatcgccttccaaaggacagcccttccacgataaaagcagctgattgtcccacttaacagctattaagtggtgttaattacctgttggattcagcaggtctgtagaattttgctcaaaaggaacaaatgagggtgactagcatgagactgtgagaaccggtgtctggggaagaagacacatgcagctgtcattcatcaattagcgcttgctttgtttgtttgtttgcttgtttgttttatgtggtgctcagacgttcatgccaggtgccatctaccactgagccagtccccagtccttcagtcttaacacctaggctgtagcccgggctggccgaaaactctcttggctctagctcccaagtcctagaatttcaggtagtgccacaatactcaagacaatgaatatttatggactggcctaacagtgcatgtccagggaagcgtccttactccccactgagatgcaaagacaaggcagatgagcccagtgccctccagagcctgggtagggcaaggtccacactggcaccttcctaagtgttgactcaaaatctggccatgcgcatacaagttgggagagacagctctaccaggagtctgacttggtaagttcacattttgagaaaaagacataataatattgtaactgttgcttctggaatgagcaggagtggcagcctcctcatgaaaactgtcagggtctgtttcatacgagcataatgagtatttagagtaaagatgtgtgtgaatctcttggagctgcatgtggctcatggaacctccacaaatagtagctactgcctagaagatgaggcatttgatctacacaatctccacagaacttttcagctcaaatattcctgacactttgtaaaaaaaaaaaaatagcaattgaactcccttaaaaattaaaccaatgtatcttccctctctatttccagggcttgcaagttgtctgagtgtttttcctccactacttcctgtcctcaaaaatgccatgagtttgggggaatcagatcatctgcgtgtcagcaatagctatgctgctttggttagaagacagtttgttcccttgaatttttgcaagaatttagtccccggagtcttgttaatagcattcagagggtggaatctcagcccactctactatttagaacctttgggaattgatcaggtcataacactaggctgagagctctgtcttagctacttttctattgctgtcataaaacactgtggccaaggcaacttatagaaggaagtatttaattttgggttcatggttctagagggttagagtccatggccatcattataggaagtaggtgtctggcagtcaggcaaagctctggaacggtagctcagagctcatatcttgatccacaagcagaagaatatttttaaggatgaaaaccctaccagccttttcagcagcctgaaaactgaggccaatccaagccctaaattgttgagtcttggggtcaataggcctggccctactttagtgtctgtctgccccatatccacactgctgtatccttaacctgactggttcattacaggtatgtgccattgggcaaggaaaaatatggctcaagactctaagctctgggcacccaaagcgctggcttagatgtagcaggaggcaggaacacacataacccaagtccttacaatagatcaggaatgttagctgagcacgtgagtaacatatcatccaaagaagaatgtggtgaggtacaagacagcagaagcatggtagcttcgaagaagaaagaaagaccaaatacaggcactggccaggagacacactgcggtagagtaagtgcgcccaccccaaatccatgcactgaaatcttaactgcaaatggtatagtgttcagagggggatctttgggtcatgacagtggtgctcttgtgaatggaaccttttctcttaaagcctgtatcactctcatggtggaaaacagccagctccaaagggagccagcggttgacccatgctgaggtatttcaagaatgaactattcccctcctctcctgtctccatttctcatccttctcactggggcaacaaaagcaacagcagaggagggttgcctggagactctcctcctggctcctcagctcatgattggtccaactttaaacctgactctcagaatccccttctaaagtccttaggaagctcttcaagtcccagaagtcattataccgtcccactcacctgcaggagtctatccatgagtgttctcatgcagccctgtcctcctcagggttttcatcctgctactaactcctagaagcctgtcctctctgcatcctcttcagccaccaataaccccccaatcttggagctagtgacactggcttgtccttggaggttctaagacaatagagaagatggaagccatctgtgattcccaaacaaaactcaggacagagtttcaccacctcacccactcactcaggagtcactattcctccaggtctgttggctgtgtgctgcacagacacatcatcctgccgctgtgtggcatatgtcccagtgtggaaagcatgattgaagtggtcctttggggaaaaaaatgatggctaggaagctgggagctggggagctgaggggtggggggtggggggtgggagggctggggggctgcggagactggggtggggctggagactggggggctaaacaactggaggacggggggttggggagctggaggatagggactagggagactgggaggctaggagctggggaatgagaagtcggggggtaggaggggatgctaggggtgctgggaaattggtattctctagaaatgcggcccccaaagtcaaagattgggaaaatcaccctctgacctcacttcagctgagagatggcgatggtcaggactgttagctagacacacactgatggagttgaaaaacacataagaagtcttccttgattatctgagaggaggaggggagggaaagggtggggggaacagtcctcattgattatctgagaggaggagaagggagaagagggaagaaacattcaggacttcactcagcagcctgaaccctgcctggttggagtcgatgcctgcttggctcactgaagcttgagcagcattaggagtagaaacccattcacagaaacatgtgtgtccagcacgggccagggtctaaggtacctgggagacacacagggcagcaggatgaagaagctggctctagagctttggagagctttggaggctgtggaggagtcataaaaatgaagtcttacatcttgggcttagttctcacatctgggggagtggagagcgagaaggctgagaacaaggccagggctgtgtctttggtgtgaccagaaacaagggaagaaagaaaagcagacagggacgccaggaaaaggccagccacacaggcagaaggaaaacagagagcatgtgtcaagctttgtacataaaacaaagatgtggccagccagatactgtatacgaggcaaagaccacagggaaagaaaatgccatgttttctgtgacaccgaagctgctgccacttcccacactgtctcaagtagtgcttggcaaaggctacgaaggtagtgattagaaaggcccatggagatcagggattcctttgttggatgcatgcaagaagtgcatctgtgtgtgacaaggcactctgtgggaatacctggcccaatgccactgtctaggtgacatcggactggagtgaacatcagctcttcacttgaagtgatccactgacaggtaaaatgtcagaatgctaatagttattcagaagctagagacagtctgcaagtcccccgtggtgcccacagcactcaggggcggtgctgtcatggtcagagagtgggtgttcaataataatcaatgaagtgattcatgggatgacctggaatccaagtaatcacttcttcactaccaatcatgccagctcatcctgtcatctgcaaacccctccaaatgtttttcggttaccaacagatacagagtccagagccaggtggaatttatgctacctgagaccacagcctggtgcacgtagacaagaaagggtaagtccattggcacctatccttcttacataccagggcatgagaagcaggcagcgccccagcccgccccagcctgggaagtgtgtgaagagaagctgccagcacctgccctcagttatttttgttgttgttgttgttgttgtttcgagacagggtttccctgtgtagctttggagcctgtcctggcactcactctgtagaccaggctggcctcgaactcacagagatccgcctgcctctgcctcccgagtgctgggattaaaggcatgcgccaccaacacccggcttctgccctcgattattttacaaccacaacctctcatcattatcttacccggtgcccaaggagacttctatcctcataagttgcttcccagtcatttgagggacccaggtaaagtgtgcttctgtgacactcttctgattaggaaactccagaaatagtaaagatattggttattacagcagcttgtatgacttctaaactggtttctggagctttcacttcggggagaccgggtcaggctttggcttcttaggcgacatatcatacagtctatatgttatagactgatttgtttaaattgtatttaaattagaggaacaaaacccagtgaaaccaaagtaacagaacatatttcatactggttaggaaatagttaatgctatcagaaggcaagtgtgaggatggtatagagtgaaatcaaggccaccatgggtaacttagtgagaccctgtctccaaacaaaaacatttcgtgagggcaggcgctacggctcggtggtagagtgcttacttaccaataaagaatgctaaagtttttctccttcctttcaataaaactgggttaagtgcatattgtgctgataataataatagtgatctatttggtgccttgactgcagcagcgtgttttctgtgtggtctcctctgtgccttgcaataattaagcagatgcctttacaccccacatcatgctctaggagatgaagttcagggaagtcgaagtctggttcccaaggtcgcatagcccactgactcgaccaggattggctgctgggcctacagcccatgtagactgaaagaaatcaccccttgggctggcactcgtcccatgtacatggtcagggcacccaacaatcaaggtaaggccagagccgtggggtcagcaacaaaaataggaactctgcaaagatttgtctgtgatagagaaaactatacacacttcccaaaagacatgtgttgtttcctctgtttggctttccaaaatacccagagacactttctagaagtaatgtgtgtggcgattgtagtttaagtcaagaaaggcctcccaggcaatgtgtgtgtgattcctggtccctcgaaagatggtgtttcgctgagtctggacctcacaccagtacggtcaaagaaagcatatgtaacaaggatgctaactatgctgggcttttctgaaagcactttaggtgacttggcagggtaattagcatgacttagtggtagcctatcaatcagagcactgccgacaaacagcatggcagcgggaacctgataagttgggaacttgagctgaaactcagagttttcaaggtggttgccagagcaacctcagggaatagtctctggaagaactgaagcattctattttagaaacacccagttgatcatcggagccagaaggaaacaaaccaaataataaggtacagaaaattcttatagtatcttatataaagatgagcatttcccccaactggaaacagttcactctaggaggaatattttgaccctggaagcaaagtgactccacagaggcctgattatcacctgtgtctttcacgaaatactggaattaaaagttgctcttttcgtatgaattttctctcaagcttggcaacattacaagcttcctatgaccttctgagtctcatctcctcgaaagtcacccctgcatgaacgcgtgtgtgtgttcctctattcaacgaccactcgctaaataatttaccttattgctgtataaaatgtcccactggttggaccccagtgaagatggattaatgacagagccctgcctttgggatgaatacaaactagaggatgggtacaaaaggcagcatatggttggagagtcccccagagccagcatttgtcagactgttaggtatgtgggtcatccaatagatcattatcaaaatgacgatttgcaaacatacctccatgcccagagagtggggtgtcggggctgtgttttaaatgctgtgcatatggagcgtgagggtgttgtctagccaacctggatttatgctgaggagaggcaggaccgtgaaccacccaagagagagaggggtggggaccactggcaaaggccatgaggatgagagagagacttgatgcaatcatcagagccctatgagcctgggaaaaaacacatagcagcctaaacaaaggtaattcagttgactgtggtggatgcatggacaaaaagtgggcatctgaaccaagtctgttgtgtacctgatggttgtgggttgaagtgggcaagctcatgaaacccagaaaagtgatgatggtcccggctgattaccaccctggatgcaaagctgtcatcataatggtggcatcttaaaccagccctacagccatgctctggtgaccagaattaaccactatctgtgcagagagacagttactgtagttctgactgctaaggggtcaaagaccaagccttctgtgaaagcaagtaactgcaataacctcatgcccacaaggtactctgtgaatatctcctttgacaaactgtcgtcaccaaggttgtcttcagagacccagctctgaagcacaaggtcaagtctgatgaacaacttaactgggcaagaacaaatggttctcccagaagctctggctgtaggtgttttctcccctcgttaaaaataagaaagagaaaaatcgataagaaaacaactggttcttagagtagctgaaatgaagaagggagacacaaaaaaaattatcttaaaaatctcagatagtgctttgtttccaagcagaatataggaggctcccaatgtgcggttaattaattatgacatatttgtctctgcacagctatatttagcaagaccggggaccatacttagtttacttgggttttaaaatatttgtctctgggtttttctcaatttctacttcagagaaggtgcaggtctgtgcacaggctcctacaaagcatctcacttgagccaggacttcacagcaccatggggaagtgaggttgaaggagacacagccttgaacttcaaggagaatatagccagacacaggagatcaaacaggtaaacaagacatcatcttcaggaagattgcttttaaaaacctagcaagagagagagggccagaagcatgtcttcagcaatggaagaggggaggcgttgggtaagaaggacagctaaattgaaacgcaaaggccagaggtgcaggtcagagatacagcacggagatcatatacacaaggatctgcatccaaaccccagaagaacaggaatcacggagcagagaccgcatcctgcaggtcttccttgtgcggctggcacatagcaggtactcagtaaacaccgtgtgagaaagtgagtgtctaaaagcaaacaaacaccagtgaggcttacagatagattagaagaaagacacagaaggcctcagaagagaggcatgtcctttactcatggtcctttctccaaaagtggaatctagaggttctggataagacatttaatcataaggtttgcatgcatcattctgagaccactgggaggaagaggacaaagggacagacccagacccaggaaaaactaacaaacaaacaagccaaacagacaccaaacaacacacaggaaatgactataaaagtccagagaaaagaaatgagagcctgagtccttttggcaatggcttggaggagagggcctatcagacacagagcacacagaatacagaaggtatggaattaaacacaggcaacatggaagatgtctcacccaaccagtgagcaaaaaagcacaattgtaaagcaatagtgagatcctccgagtgaagggagggttccagtccttctcatcctttcttcacactctggtttcaaacccccaaaaagcaacagccaccaactgtcccaaacccaggggaaatgacagggaggaagcctgtgctctggctgtgggacctacccctaagacatacatacattcctctccactcctataggtaggtggtgtatgggtttatacaaaaaactgctaagtcctccagcacgcatcctccatacaggccagggcatagaagccagcagcagcgcccagccccactcagccagtaggtgagggtccaaagcctgcctctgtggcaacaccagcctggagtcactcttttcctttgtactcaaagatggcagagccccacatcccatccatgctgagaagtgactgtgataccatagtctaaactctgtctatcctcaactgggctaaaactcaaacatgtggagtagcgtggtttaccggcaccccttatcctgctactgagtttgaaggacaggaagtagggaggttaagattctccattaatggttaaaaaccacatgcctggaattgcagagagagagcaggtggcagagatttggggtataacctgaaaatggctgtcattgaagatccactggtgggctgacgagatctggagcccagagctgcacagtatattcggtgtctgttgagcagacagagtgacacgccagaggtgatctgaagaacaaacctctcatctcaagaagtcacgctttaagcaaccccagctgattgctgtcttggggaatatgtatcaattactttaaagtacaatgctgctttttttctcaaaaggatcttggggtggggaaaaagggaagaaaagaatcttaaaattcagaattttctgcaaagttttcagagttaaaaagttttaaagggtcaaacaaaacaaattctcaggtcacaccctgtctacagcccatcagttgcaactcttagcatgggggtggggggggagggaaagagagacagaaagaaagagagggagagaaagagagagggagagaaaggaaagaaggaagaaaggaaggaaggaaggaaggaaggaaggaaggaaggaaggaaagaaggaaagaagaaaagaagaaggaaagaacgaaagaaggaagcaaagtcaagggaaaacatgcatgaaccctatttgcggagtgaggcaaaggacagaaatggaagctaaatgaacacaagtcagaaaaaaaaaattccctcatacaggaagccaaaaatgaagaaggtagctagagtcacttctccaataagtaagaaaaagcatcaaaccaagaagatggcctctggatttggtaattagaacacggttggtgacctcgaaagcattactttcaacagaatgagagggatacccactcagctgccagagatctccagacgcgtaggaggatgagcaggcaaggactgcaaacgactcttcccagaactcagcagcccgcagtagaaggagcgtgtgggatggtagcatgaggggttgccaggccaagagatcgctctttcagaacagaaagataagcagtgtttgaagatgaggagaagtgtgctgggtgctagcaagagggaggagatgctctagacaggacagagggggtggcctggctaggcctccaggagagtcagatgacagttgctagaggggataaaaggggccctgagaaggtttggagaggaggaacatgcaggggagggggaggagatacgggacttggcaccaccacaccaccagtgctgagaaactaggtgacggggaaggcagaactgctgtggagccccagaaggcagaggaagttagcaccgggaggcactgtgacagaggtcggccagggtggcttagaggagagctacacgatgactctgcttcaatcagagagtggaaactgggtggacgaggcactctccagcaatgcctgtgagctggcatagaacaggctggggaggcgtgtcaggaaggccagggtaacaaggacaacatatgcccttctgtgcttttctatggggctctacacagtgagggccccagcaaacgctgaggggctccatagctgacagccactgtctgtggtggacagccatcctgctcacactatatgcctcacacatgtacagacgaagaccttaagaaagtgagggctatgatgccatcagtctgagtgaagaacagggttgacattttcaaccagctcttggatgacagtcaagttgctggtcataggccactctaagaagagtgctccagggctcacacttctcaccaaccatgacgctcacaataacatgcttatgaagatctagtgaaagctggtcatacttggggaactgtagtcagttgaatatggaggatgctccccaaatgttggtgtaaaaggtttacaccccaaaccggcgctattaggaggtggtggaatctttgggggcactcgtggatggtctttgggttatcgatgtgctttcaaatgggattgtctcttcctctcttgttgtttcctccttgtgaggtgagtggtttgctccacaagctcctgccatgaagtcctggttcatcacaggcctaaagccatgggtggaccagttagtcttaaactgttgctttcaaaactgtgagccaaaataaccttctctctttgtaagttaatggctataggaacagagatctgactgatgtaggaatccacagaaggataaagcccaaacgaaggaagaggcaaaaggcatccccaacatgacatgagctgagtttaaaagagaaggtccagccccaagtaaaggggaggaatgaataagaagagcaaagggcactgatgcatcatggctagagcacgtctcacaacctcaagaagggccattctgctctgtggaaacttcctagcccccatgctgctgccaagggaaattcatttgccactctttccccctccttagctacattgcctcgagcagtgagtgtgtggtgctcaagaccttgcatatccagcccagaacacacagggaggagccagagatcttgagggggggattggaggcaaaggtgctgagctaccagaaaaaaaatattgatcagggtgatttgtgacttgacacaactagtaataaacactacagagcttgactatgcgtgtaaggtgcacagacggtgccggggagatggaaaggacagtgcttagccctgtggcctgcgcctttcttcatttcctccatataaatgtttccccagggaaagctaagcatgcagcctgctgccaccatgctgctcagccctgctgtgtacgggaaccctggggacctgttagcactaccctctttcagggactgtctaaaaaggctaatgccattcaaacaaagagtgcacggactgctctggattaaaggagaccatggaaacatgacatcttgacgccatgtgtgattcttgattgaaccatggattaaacaaactataatatagaaaattatcgggaaaacagtagaatatgaacaagaggcataatgctgtagtaacgttttaacgtcttcagtgtgatcacgatatttctgttatctggggaatgtatgtagggatgaaaaaccaccatgaatccaacaaaaataaaaaaatgtgtgctgaacatccagggtgtcagggcaggaaggagcccatgaagcatgtgtggctgttgctaaggagcaatgactcctagagaagcagcatcaagcttcatcgtcacaccctttcagcactctccgatagcttttaaaagcaaaagttagaagagggtccctgggggttcaagtgcacattgtcccatatcccatcatccactgcagaccttagcccctgaagaggctctgtcagcattcagagcctgtgctctgcctagaagattggaaggggagtgctcagccgtgcagctatcctgtcctggacagggcaacccttctcccccaaggttaaatgccacttctaggttaaatgaggctctacatttgctcctctctgaggacttgtaggagtcccagctgcatcctgtgggtgatgccagctgactcacctgtactagttggtcgtgactgtcaactggagtttgtatcatctagaaaacacaagtcttgatgtgtttgtgtaggcatttccagagagaattaattgaggtatggccacctgtcctccatgtgggtatcaaacttcccatgatggctcagatagaaaagggtctaaggtaaaaccgtgtgcctctgcctcccctccctttttctttctgagaaaatccatctatcactactgctgcccctatgctgacatccaactacagctcctttcaccctctggacattaacacaataccaaagaccgtccaggctttctgcaccacatcagggttgctgaggtgcccagttgcttggcctgagagctattaggttttctgtttttccatcagacaaatggccattgctgaaccacccggcacctatcatcataaagagatctaatagactgtgtgtgtgtatgtgtttctgtgtgtgtatgtgtgagtgtttgtgtgtgtgtgtgtgtgtgtgtgtgtgtgtgtgtgttgtgtgtgtgtttttgtgtgtgtatgtgtgagtgtttgtgtgtgtgtgtgtgtgtgtgtgtgtgtgtatgtgtgtgtttgtggggggtttgttgtgtgcttgtgtgcaagtgtttgtggggggtattgtgtatgtctctgtgtgtgtatatgtgtgtatgtgtatttggctcagttcttctagagaactctaacacaccaccccaggcagcacctacccttgggtccactgagcactctacgagtgtggcctgtctgagtgctttctgaacagctgtccaagccctcaccccacttcaggtgtgctctgggaagcacaggagttgtagccattgaccagtccattgaaagtggcctcctccaccacctgaatggtacctgttgtctgctagcccctgtttcctcgctctgagcagcatatgctgggggctgaagtggggaagctgcacacgggtgagctgaggggagcaccaggcaagcgctcgccctgttcttcttaaactccctctgtgtatgaggctgctggccatagaatactaaggtcctacagaaccagggaacaattctatgtataaaataatgaggctatttttttgcaacctggtgggaaaaaggacagtaatttcggtctttcaggatacaaattgctttcagaaatgattctaagctcagaaaccgggtaggaatagtaaaaatcatggctggacttagtgctgccattgccaggcccacacagttactaaccatggagagagacgggacagccaagggctctctggggtgttgttttgcaaacatggctacacagggcaatcacttggagggtttcaaaaatacccatgctgggtcccatgctcagaaattctgacttcgtgggtttaggtaaaattctggtcatctcgaatttttattctcccctaagtgactctaatatactacaaggtttgaggccttctgctaagacagcctcataattcacattcattaacacacttgctgccctgtgcggttcatctgggatgctagcatatttaaccttggctagccctctcccctcccaagcacagggccaaacggggtgtgtggacaccagatcattgtctcataaaaatctcctgcctctccaacaggcaaaggcacggacctggtacagtcgggagccttcgggtgggagtgaggggggctcagaggagccagctggcagcatcacaaaatgctgtgttcaggcctgagcttccaattctgcaaaaaggtttgggagtgggaattaaaagtcaaccatgacagggtggtttctacaggcccaggacagtgcagggaaaggctgcttgctgagaggaagccctgcagtcaaattttcactgatttccagttgagactagggatagagagggagggaaaaggactcaggtccatgttggcacacttcccacccaggcaggacaaggaggccctgggagactttagaaaacactattgtctgaactcagtctggaagaatcaagtgccactttttggatttgagtcatttggatccctgggttttaagcctctaggggtttccactgtgctgctggggttgagaaatgctggcctgttgggatacattcctgactgctgagctgtgcagcttcctggggagcagatgatggtcccttgtgacaggctggcctgagggtcccctaaggcaatactggcctggagaaagagataccctctttgaggggggtggcactgaaacagggtatcactgggcttccccgctgtcctggaactcattctgcagaccaggctgacctcaaactcacagagatccacctgcctctgcctcctgagtgctgggatttaaaacagctgtccagtttagttcagatcagatgggattaaacaccatcctgctcacagataccctctcccaccactaagtaggatacagagtgctttgtttgacctccaggctcccttctgatagaagcacacaaattattgttgggttatttgcaaggggccaaataaaatcagaaacagaatgttcataaatacagaaattgctggatcttgtggtagactgattcccattttcctgagtaatcgccatactgattcccacagtggctgtaaaagtttgcactcccaccagcagtggaggagtgttcccttttctccacatcctctccagcataaactgtcattggtgttttttattttggccattctggcaggagtaagatggtatctcagagttgttttgatttgcatttccctgatggctaaggatgttgaacactttcttatgtgtctttcagccattttagattcctctattgagaactgtctatttagttctgtaccccactttttaattggattgtttggtgttttggagactagcgtcttgagttctttgtatattttggaaatcagccctctgtcagattggggttggtgaatatcttttcccagtctgtgggctgccgatttgtcttgctgactgtgtcctttgccttacagaagcttctgagtttcaagaggtcccatttatcaattgtttatctcagtgtttgtgctactggtgttatgttcgggaagcagtctcctgtatcaattaattcaagggtatttcctactttatcttctaataggctcagtgtggctgggtttatgttgaggtctttgatccattttgacttaagttttgtgtagggcgaaaggcttgggcctatctgtagtcttctacatgtctgaatccagtttttccagcaccttttgttgaagatgttctctttgttccatcgtgtaaatttggattgtttgtcaaaaatcaggtgttcgtaggtgtgtgggttaatatcagggttttcaactctattccattggtctacctgtctatttttgtgccaataccaagctgttttcaggattatagctctgtaatagagcttgaagtcagggatggtgatgactccagaagttcccctattgtacaggattgttttggctattctgggtcttttgtttcgccatataaagttgagaattgttctttcaaggtctgtgaagaattgtgttgggattttgatggggattgcattaaatctgtagattgttttggcaagattgtcatttttattatgttgatcctacctatccaagagcatgggagatctttccattttctggtatattctttaatttctttccagcaattccactcctaggcatatacccaaaagaagcacattcatacaaggacatctgttcaacgattttcatagcagcactatttgtaatagctagaaactggaagcagcctagatgcccctcaactgaagaatggatagagaaaacgtggtacatttacacaatggagtactactcagtggaaaaaaaaaaaaaccaatggaatcttgaaatttgcaggaaaatggatggaactagaagaaaccattcccagtgaggtaacccaatcacaaaaagacaaacatggtatgtactcactcatatgtggattttagacatagagtaaaggattaccagcctacaatccacactgccagagaaactagtaaacaaggaggcccctaagagagacaaacattgtcccctggagaaggggaaagggtcacgatcctctgagcaaattgagagcatgggaagaggggggagggagctacgggaatgagaagggaagaagaggagggatgcagaggtcatgagggagcagaaaggttgagtcatggaagaatagaagaaaggatatgtgatgggtagggttttagttgggggggtggtaggggaggacgggagagagaagggaactgggattgtcatgtaaaacaatcttgtttctaattcaaataaaaaaatgataaaaaataatacagaaattactaaaaaagtgtttactgtgaggaattgtgcagacttgggtgatagtgtttaagggagcagcttttgacctgatgagaagtccatgatgaactggaacaaacaaactatggtcgagatctgcttattctcaaccgctaatactatagcccctagcacataccaagccctgtggtttagtgtgccgctgtcttaccccggcagttgctatgtaccatagccataacttttacaatgtggggtacatcaccaaaactagctgggatccatttgtttcacactttctcaaggtttgtttttacagtgtatcttggtaacatcaactgtttctttctcctcttactcattgagaactctcacctttcagttaaagggagaacttaaaagctttggcgttttcaaattgttaagtaagttatccttgtactttctgtcacgattaaataaaataactgtcacatagcatggatctgtggcacaaaagacagtaggcctaacaattgggatctgtttgctaagtgactcaagggcaggtagtacataccatgtggataccctggacaaaaatgtgaatcgtgtctcaacaggaagaaggcggcgtgagagctcatcgcactatttagaacagtgtgcaatttattatctgtgagtcatttattcacagaattttctatttaatatctttccactaattaaattttccatttaatatcttttcaattaaaacttcagatgaggagaaatggctgtatataaaaacctattttttcctgtattggggaaagaagcaaaccccttcagtcctctgtgtgtgtgtgtgtgtgtggtgtgtgttcacatatttgctgtttgtgagtacatggaggcatgaatgatgaatatggactaagatgtttggtatcaattatgttacagtcatagcactatcctcccaacagccactgtcgttgtcagtgcctctgtgactgctgtaagagacgcccaagatagaacctgctgattcctcacaggagacagtgccgagggtctctcctgataactcgttcactctcttcctcacccccatccaactgtatgaattctggcctaactgcatgtggcctcagaatctaagtagacatagtatgaaagagaaactgaagaagattccatctaagcagctatggggaagtcaccatccagtctaacgtgagactgttcagtagttcgggggccttggagtcatttgccctcacccatgctctgtaagtaagccccgttaattcactggctccccaaactgggagcagactgttgttggtgccatctaaggaagacatagacctttgattctctctcccaaggaaaagagtttcccaaactgagtaggaatgggagcttcttagtatttcttcatgttaactttgtttgtatcatatttgtggtgaaaacagggcagagcacttttataacttaagcagttaataagagcttaaaagcaagctctggaccaagaccacctggactctgacttggctttgcatgtaaccggcaatatcacttaacctcttttctgctccctctcctcttcaatgaagacgagcccacactgacatcagaactgtctcctcatattggacagactagctacacatcgcagacaatgcctgcagaccagacagcagatcgggtaacttagtgaaaatctttacttgagccactgtggcatggtgactgttgtcccactggagacactgcccctaatgcggtggtgttggaaggtccatcttggagaaacgattaggattagctgagatgatgaccagacaaagatatgactaacactctagagccagcatgctttctccacaatgaagacacaccaagatgacagcttcctgtgggccatgcagcctactttcatcaggctctcagtctactgatcccttaatcttggactccccaccccagaactgtgaaggtgaacacacccaggctgttgtgttttattataacagaacacataggccaagacagtcagtatggactcatcttctacatccgggtaacctcctccatcaaaggaaacaacctatgcttcttcctctgtgctctaggcagagagaaacaagcttacgctggcctccccaaagctggtgcttgtaactacctcttggcactgcctgcagacgaccataagtggtctgtcatccttattctctccttcagccccagaatggctcaagctggctttctaccaagtgacaacttctggccaggaacacacctcgatctcctgggaaggaatgttctctaaacaaaaatagggtaattacacaacctcaggcccactcagcaatctgcacatccataggatgtgcgcgtcatttatatagatttgatctgacccgtgtcttctggggagacaggagtgagagctaattagaatgataaatggcccacgcctttcatgatgtgcactaaattaataggtttggtggtagacctgaacgctgcttcctatgagaagcacggcctcctggagggatggggcccggtccctttgaggcacctcctctttttttttttttaacacatatcttagtttttattctgagctcagcatatctctgaagtatacaggttactttaatttagcagtttctttttttttttatccaatatcccccaatgtggttgtttccttatcagtagcatttgaaaaggtaaagttaataatcaattatttaatctatctctgtcagacttaattactcctttctggtgttttggatattcatatttttattttttatatatttgaattagaaacaagattgaattacatgacgatcccagttcccttctccctctaccaccccccaactaaaatcctacctgtcatatgtcctttcttctaatctacacctgactcaaaatttctgcttcctcatgacctctgcatccttccttttcttcccttctcactctcgtagcttcctcccccctcttcccatgctctcaattgaggcacctcctctttatcacaagttttgctcacaataagttggcttttcattcagacaaacataagaccacttcttctttttccaaattccccatgatggtggggaaatgctagaaaagcaaagcccagggactcgctgttcaccgtatcagccagtcaccaagggacagagttaacagaagaccaatggttttctctctcaccgtgggttggttgttttcataaaatcttttccctgacatgtgttgactattcattacctttcccatactcatgttgagtgaggtcctagctcctgggaccacagaatgtgacaaacatgtggagacagggtctttaaagaggtaattaaagttatgatgtcactagcacaggccttaacccagcatgccctgtgagcctcacgtctcagtctccacttgacacagcagaagaggaaggagatgctctacagggggtctggtattgttaccagtgagcttgtctttctctgtcacttggtcagcagtctgtcgtcattcggacactcaagcctcactggccacgagctgtaccaggcagcagataccgtatatgtatgtttcacactgactgtgatagttagttttgattttcatcttgattgggccgaaaggagtagtaaagcacactgctgggtctgtctacaagggcgactccaggagccaatgtgtcatgaggactgccatctaatcagctgtattattggccaattcatcacgacaggagactgtagaagtggcagggctgtggaaagtaaggctggttagagaaagtgggtccactcggggattgtccttggaggttacacaccactctgacttcccagccaccaggaggagagctgctttaccatgtcccccctgccacaatggactgaagcctctggaaccatgaacaagacaagttttcctatgtagtttctgtcgggtgtttggtcccaacacaacgtataactataacactgatcttacaggctgctgatgagacttttaccccttctgacgtccttccacaccaaggcctagaatatctatgtttgaaatcctttatcaggaactgaaaacagcttcatgtcccttattcttggtattctgctagcagctgccacggccactatcaaaaccccatgaagtaccacaatggccggtattaaagaattctgcagatgccttctcatcatgcatcccgctggaaggattggaactctgtgtccccatagcaggagccttcctgacaggctcctttatttggttcccaccaggaggacactgtggtgctggcactagcttccactggtgcgccgaatcagtaacggcagagatatcgctgctaaaaggctatcacagggaagctgttcttgctgtgtgttccccgcccacctccccctgctgtcactgctgtacattgtccagaattccatcatcgctttgaccacttggcagatacagaaaggagacggtgtgggtttcctgtcccctcatgataatgacattttgcatttgtatttcacatttaacttgtgcggggcattttcctagtctattgcaaagtcttatcccaatgaaacaaaactcggcgtgttgtataattgtctgtgccatagagacagcttagggacaagagccagtgaaactgggagctggaggaggaccaaggatccaaattgcttcaagaatcccaagccccatagaagttgcaaagggagccagcatggcagctcagagatgtggcttctccatagggaggagacacagctggaacgagccagccagcttcctcaggctgggagcccatgggaatctccatctgcagcccagggctgcgttgctcctgccttggtgcaaatgctgctaggtttaccttgggggagaggggcagtgccgccgagaataggaggccgttagatttggatacactggtccacgctgtgacctagaaacagctcataaatgtttcctgctccttcagcaacttggaaaagggttggagtgagggcctccaagggagagcatagcaggagttgaaatgcagaatttttgcctctcaacgcattttggaaaaggagacatcgacaaagaaagtttgtaccaagaaaaaaaacaagttgtccagggactgcttgagatgagtcaccctgcgggacggccagcactttggaagttaggagcccagcgcctccaatctacttgggcacccgttggcaaattattgcttttattctagtgccatttaggaaatgatggctctctaaatcataccctggggacatggagagtggaaatgcctccccacctgcattgcccaagtggcttccctcccagttctgtggctcacagcctgactgcccattagcatcacccagggagctgctaacaacccaaagcctaagctgggctccagaccaactcaaccacaagccatggggtaggaccaggcagcctaatttttaaacttcctggtcgagattggaagccagagtactagtgcatccattacaacgctcacccactgagcagtgagagtcactctcctaacaaagcatgtggaacctgcccccggactctttggtctcctccacatgtaactttttgcctcatgaattatggaaatcatcatccagagcagtgtgtggtagctgctctcagggccactaaccctttcaccaaccctttcaccatccctttcaccaacccattcactaatccacttaactaattcacataaactgaatccctgctgggcactacaggaggtacagaaagaggagaacatgatccttgcattcacaaacataagtgcgcaaaatacatgtgcaaggcaccataatataaggttttgtgtggtggaagctttgtgggactcttgggatggaatgaagagaaaaagtgaaagtgagctttctttgggctatttaaacacatcatcacgtcacccctccctctttctctgtctctctgtctgcctctctgtctctctctctctccgtctctctctgtctctctctgtctctctctgtctctctctctctgtctctctctctctgtcacacacacacacacacacacacacacacacacacacacacacaattgtgagacccccacatgcatgtatcgccctcagtacacgattcaggaccacaaactgagaaggctctgaatgggttacaactggatggataaatggggctgagctcactagctccatcgagaccgtcactgggcctctcggctccctcctccctcttcccaccaggcacagattccttcaggtaccattcagcttcactcaacctgaggcacttcatctcaccccgcccacggccctcgcagctgctcagcagcctcacacacacacaccctgagactgtggccagaagctctctcccaatacccactccccatttctgctgagaacacagtctccccaaataaagacagatggggcctttgcatgaaatctggccaatgagtcaaggagaagcagagctaacttttgggttgtgtccttcaaggcaatggcccaccacacttcttcccttcatcctgctgcttgaacaaggtcatgcagtgatgtccctccccagccacatgggcaagaaaacactgttgcagaacccaagaggtgggaggggggggaatccaggtctctggatactcttgggaggcagaggactctgtgggcctggatgggttccctccagagtgagttccactatgtcccagccccaggtatactggatcccttagagccatcccatgtctccatatcgcacatgtcctgcaataaatacccggagttctttttcacgctaatgaaaatggtaagacattacaaaaacccaacttatttctagcacactggtcagtgatctagtgactctcacaacactaagagcaggtgtctgtaaaccttcatgcgtggtgggccaggctgtgggaacctgtatcctcaagaaggtagcacaatggtcagctgactaccttcctgattgtggcgcttgcctgggcttcattatcttcactggtctccagagcctggaactagggtagaggtaagaaggtttggaaaataatagctcctgtggatggacactcctgaagcagcagggtgtggggaaggcaaatgtaccaaccagtggcatctgtgagctgagatttagccaactaatcagcctctctgaagattcagcccatcaaagcccttcagcaaacctactggacctgacttgccaagattagggagagtgctaggactttccatggaaacctggtgtgtgtgcatgtgtgtgagtgtgtgtgtttgtgcgtgcatgcgtgcgtgcgtgtgtgtctgtgtgtctgtatgtgtgaacatgcatatgtgaagagaggcaggaagagaaagggctgattctacagaattgtctaggatgtttcaagagtatttgggtcatgggcttcagtcctcatgaactggtatggagccctcaggactggatgagtgacctggagagtgggttattataaactacccatgtctgctgtgttcttggttttcacagaacactcctgttctctataaagtatccagtctctggcattctgttacagcaacagaaaataatccaagaccaaaagttatcagcttttctcaagttttcccatttaaaggttaatcccatccaaaatctagactcacagaaatatcgagaattatgtctgaccactgactgagcaccacagcctagccaaattgatacataaaatcaaccatcatgggtggaggggaaatctctctgtttagcaatgcactcatattgttgtgaggcatagtcagggattgtgatcactcttaataagacatcctaaagtcattgaccccaaccccaggctactagactccttccctgcctgaagcctgcagtgtagccccatatctatctcaaatccaactgtctgttgagccttgggtgaggaagacattttgtccatacacagccaagacagagcaggcttagaaacacccaccccagctgagtccaggactcttcctcatcctggaccatttccactggagtcagcagtgagccacacctgcctgttgactgtcagcatctctgggttgctgacattttctctctcccttatccttcaactagcccccgcccacatgccccaggtaccattttggtgaccacctatgaatgactggcacatcctgtttctgtctctactatggatacgcagggggcctctgaaaagaatgcagacagcagaaccctctcaagacccactggattagaactttctggatgcagttcatccagaaagatgtatgtcaaatgtctccataggggacttttttttaactttttaatttttttaattttttatttttttctccagttttaaatgtgaattagaaacaagattgttttacatgtcaaccccagttccctctcttttccctcctcccctaccaccacctccaactaaaaccctacctctcacataccccttctgctccccagggagggtgaggccttccatagggggtctttagggtctgtcatatcttttgggatagggcctaggccatccccgtgtgtcctggctcagggagtatccctctatgtggaatgggctcccaaagtccgttcctatgctagggataagtactgatctactacaggaggacccatagatttccggggtctcctcgctgacacccatgttcagggggtctggatcagtcctgtgctggtttcccagctaagagctccctgttgttcaggtcagctgtttctgtgggttccaccagcctggtctggaccgcataggggactttcaaaacttccagctccactaataaatagagacaacagactggcatttgctacttccagatactaagccagcatgagatttccacaacacggcaccaagggctcagtggagagcactgaccgtttgccctgtgatttttgtccctccggctctgttcctgacttggtcccatgatgagttccaggaaatagaatgatagtaggttttatgtagacctaagctttgaagacgcactcatgctttgccacttcgcccgacgccacaaggatgaaccctggtaggtgtgggaaggtaagatgtagagccagccatgccaggggtgaccagaaatgaggagccagagatttaaagaagcctcaggaagacaaaagtgctccctccgtgccgtgtcccaccaagaccacagagtgcagcggatgcccagtggattcaagaggaaggcaaatggcggctacagtatactggcctggttctttattacgatggccgtagaaacctgatccgaatgggtcgggcagctgcctagtgtcagtcctctgaaaaggcagtgtcaacgtgtttgtcatggatatgactatcgggcccttgtgtgaccctgcagctctctgggaggagtgaggtaaggacaggcacagtccctttgcctccagcttctggctcagggacctcatgacagcactatttacatggtgagtaaaatgttctgtctctctgactcacaaggagttcgccacagagtccctgaaaataaattattcatgagacatggtgttggcactacttgcaagttttgttccaggatatttttacttttcttcaagcgttcccttcagggcgaactatcccaccacgaagttaaatggtattaggaaggatcccacaggccctgtgtggctctctggattcctgtcttctctttaaaacagatgagctgtactactgcagaggtggcctttatgggttacattttgaagcaaagtaacgacttgccctacagtgtagagattcaaactatggactgttcaaatggacttgccttcccatttcacttggggactatgagacccacacatttcaacttctccatctgtccagcggggccaaagcacctacttcatgtactacacagaactgctgtgggggtttgatgagctaatactactactgcttgttccagcttagaagtccccaagccatggatatttctggtctagaaatcttacctacatgacagatggcctctctgaggccctccacacaatggcttctgagtttatgtgtcccgttcactgcattatgtcctacaattaaactatctggtccccactccaccgcaccctggggccctgcaggaagacagtattgatagctaaaaagacttgaagccaaggtaactcctgtagcagagagagctcgtgatggggggaaggagggtgcaccctcaccatcctccctgctcgtcagtccccagcaggtgtcacgcaccaaaacaatgtggatctttctcgagcttctggctggtaattgcactgagtttttagtcactgtctttagttacagaaattggacagactttgaacccatctatctgaaaattcgtggagtcagaaaatggagtgaactgtggcacagaaaagtactactttcaaaagaaagatataggaaagaaatttgggatggtgagattgctcagagggtaaagaacttgtcacacaacctgatgtgctgagatcaactcccagaacaacctgaagtgggcaggaaaggatgactccaaagctgtcctctggctttcccatgtgtgctatgacatccgtatacacaccgaacacaaacaacaaccacaataaagcaattaaagatttccccattaggaaggactcacacatacagtgtccactggccagtgttgtcatggagatcttcactatcccccaagggcctgtcaaatgtcacctgagtgatactattggaggggtggagctcataagagatagagcctatgggaggttcttagcctcttcttcttcctcttggtttagtaattcatgaggttagcagttctccctgccatgatgtgctaaccatgatcaaggttacctgaggtcacctgactccagaaagtgtgagccagaaaataaccatcccctctttatgcgtgaattgcctcaggtatttcatcacagtgacagaaagctgactaatacagctattgccctagtagtattatataataaatcattctaaaattcagtgtcttaaaacaagagtaatttgcatttgctcatgaatctaataggtaggtaggtaggcttgtgggatctagtgggcttagctctgagtgacagatggcttaggtgactccctctgcacctcattctcctcacaccactgggctggccttggaggcggcagaacttagagagggaaaggttatttcccagtggttcttgaagcctcaacacatgcaagcatctagccacatccccatgggcaaatctgctcctatggagaagtccgtcttcaacagagagaagacatgtgctattgtagcaggaagaattacagaccatgggcacaggtagataccaactgcagggacatgagcccatgtggccgcacaggacactgggctcagaagaaaaccactttgtttgaatgttctgatatctgattcttggaatcctcatttttttgataccaaagctcatattgtcattttcactggaccctgaaaaccatgaagccagtcctagacacagtgtctcagtgtttgtgacccatgtatatggcaaattgaagctacaggaccttctcagttaacagaagtggcttacactgggacagtggctacctttagtgcttcagcattgagtttctgcaatagattcagctggtactggcagctttatttcatacctgggctcctccctggagccatctgggaagcttgggccggggagcatatgggagttcctgaagtcctactgcctctgtgattggtccagtgttgaacccagagcatccgcccctgccaatcatcccactggaatcagctccaccacctccacaaaccccacccactcctccacatctcaatgagaattctcaagaggagaccggaagttgtctgattccatccactaacaccagaaaacctgtggtggagccagacattctcttggagaaactaggacttgaaggatcccagagttgttaagcaagagcgatgtcccaaactaagcagccaagtccttacattgggcaagatcaaccaaacttacaatcattgcggccctagctcttctaataaccaaaagaaccccagaactaccaaatctgagacccgaggattgctgccaataaagcaagtccctctttattctcaccctaactctttagttcccacataagacctttcctgagaccactctgaacccacagatgcagcaggccacccctccccagtctgtgcccaccatgagacacctatgtgtgcctgggagcggccaccaaaccttccatgatgtgtccccaaacagagtgtatgtactacagcctacagagcctacttactacacaccgggaggacagagctgcacaaggagccataaaatatgaatcataagcagcatcctgcagttcagacaattacccgaagaacacattttctgataattatagagctaaaaatggatccactttgcaacccttccctttctcccaacaaggccaaggaggtggctcagcagcagtcagctgtggagatgcatccattctgggctgtttgggaggctggttccaagaagttcttggaaggtacaattcccagaaggtggtgatgctaactagatctataaagccttcacactacccctaacatgggcttgtagcttgagaatcggaacatagcccatttgagagatgaacaacaggagggagaggtccaggcctaccaattttgttcacaaccctgtctccaaaacatcaaatggtacttatctaagatgatggggggatgtcaccagccaaagcatcatctcaacctgtgtacccatggaaatgccataaaggattttgggggagtgaggggcaggtcactaacaatgaaatttagtaggtgttaagtacatgtgaactgcatgtgtgtattatctactttaattctcaggataacgccataaggatgaattgttattgttctctcacttaagagttgccctgatgtctgaggatgtagctcaatggtagagcacttgccttgcacgcatgaggcccagtgttcaatacccagtgttatcctgagggtcaccctgagccataccccacaggccacgcaaatgctaaaggtaggggcaggattgggaggcagatgtttgcacacttcacagctgtggtgatttgaatagaaagctccctgccctgtaggctcatgtatttgaatgcttacttaccagggagtggcactatctgaaaggtgtgctcttgttacaggaagtgttacttgggggtgggcttcggtgctctctctctctctctctctctctctctctctctctctctctgtgtgtgtgtgtgtgtgtgtgtgtgtgtgtgtgtgtgtgtgtgtgtgtgcctgcctacagatcaggatctagctctcagctactgctccagcatctgcctccatgctccctgccatgatgataatggactaaaccctgaaactgtaagccagcccccaatcaaatgctttatttcataagagttgccctggtcatggtgtctcttcacagcaatagaacaagtgactgagataatcagcatcctttaatcctaaagaaactgaattggctgggagcagacattggggctaaagactgactgcaaagagggtagaaaatatgaacacaggaaatgaataggaccagagaagctgtgagttaaaaagtcttctgagttgaaaatgagttagcttttattttaaaacacaggcagtctgggcatggtggcacacacctgtaatcccagcaccagcaatgtggaggcaggaggattcagagttcaaggccagcggttgctacatggtgagttcaagaccagcctaagctacatgagtctctctctctctctctctctctctctctctgtctgtctctctgtctctctctctctctctgtctgtctctctgtctctctctctctctcttacacacacacacacacacacacacacaccagctaaaataaataaataaataaataaataaataaataaataaatgccatctctaaggggcaagggcggtacacggtagatatctggtaccgtcctggcatccccaaaatgaagactatagtagtactcctaactagctattatttattcactatttaataaatacaaaataagcatcttcaatagtctattgctgcttttcactcagtgtcaccatatctgatgatcaactggacatcacatctttccagcagccgagacagacctcctgcacggtacacttacacacacctgtggttaagagcctatatagttatcagactgagctaaagaagatgtaagctatagcaagttcccaatggccaggtgcagaagtctcaacaacttgaaattacacccagaaagaaattgagttctactgacatcaatgaaaaccgtctcaggtacccagggcagatagacacaactgcaaagaatacatagtagcatcttaggctgaaagccaggcttctggcaagagcttggagcagaagggagactcctgggacaagtaaagtgatgggcacttgactggcatctgccttgttagccccaccgtgctggccattccatgaagccagaggagcacgaggctgcagggggtgatctcattcctgtgcctgagtgggtcagctcagtgttcctgttctctgatgtctgtcttagactgtctttcctggtgttgctcaccacagtgagcagcaattatgtctaaacagcactggaggcagcagccagaaaggaaggagtaaagaaagggcacttggaatacaatatttcctgagtaaactcctgcggtctacggcttagagacacagatgcaaatcacatggagatttgaatatgtcaaaacgaattcctggagagcttacttcacatccttgctctgaccttgggaaagcctagggcataaggctgtgggcagtaggaccttgatgagacaacagccggccattgcctcctacggccagtctgcagtccagcaacagaaggctgggggaggtaagggacatgaatgtaggtgatcacctgccagagaacactgggtggtgcactcaggatgcaagggtggcaacctggggtctgagagacgacagtgtgatcttcgttttcccctgggttgagtcacataggtattatcttaaggaataaaccagagaatgtgaaattgatgaccggggcgggttactagtgtctgtgacattatctaggaagtaatttgcacattttaatgcaaattatatgctattttcttaatcgtcctttattccttggatcactagtattatcaaacgcatgctctcatctgagcatcctgctgagacaaacaagatgagaaattttaatatacagggtttcttagagaacatgaaagggcaacttattggcaggagaaatgatgggcttctatattaggctccctccgatgaaatacagaaaagaagtttaaaactttgtaaaaactctttcccttgtgtcagtgctggtggggtgcttgattttacaaaaggctgtatttgggcagataatggctttcctgtggccagtaccctccattctgtactgaggctggtgacggccattggctcaaggccatggaccttgcttattttacccgtgagtgcctcttctctaagctttgctgactcactttgctgactggagaaaggcaggctctgaacagacaatgccaaacgcccagcctgggtggcacacgtgcttccagaaggagcttgggacagctgtggtctactgcccccccttgacagcactttgcagtcccacccggccaacatacccagtgatcctactgaagggccagaccgcaaagctgagtgacaagttcgaacctcaagacacccagttaaaaacttccttagatcaggacgtgtcattaaaatcccgagcccagcacagacaggaacaaagactgggaggtggcaggtgctgtaaattccaaccatcatcacatggaaaggggacatcctacaactccagccagagagccctggacagagccagtgtcctgctgacatctgactgaagaccaccttctctaattagtccctcttgcctctgaagatttccagagcactgaggcccgctcccaccttgtccccctgctgccattcacccgatgacctctgaccccgcccccttcatccacctggaggacctctgacctttctcagaaggaagcagatgcgctcgatgtttctcagccgctccctctgaggacgtgcaggaaagaaaggaaacaggaggttagggtggccgagagtgtgaggctcgcacagtctacagcagcagaggaagcagaacccacagagacacaccctaggcccatgccagtgtctcttcccagcagagtctgaacctcagagccccttgctttctgttcttttgttctgctttgtttcattggttttttcagggtaccttggagctcattgtgtagccttggttggcctcaaactcatgacactcctcctgtgtccgtttcccaagtgcttgttttacaggcatgagccaccatagctggtggaaacgcccctggcaggctggggcgatgactcagggggtaaagtgtttgccactacaggcatgaggacctgagttcagatcccagaattcatctaacgagccagtgatagaggcatacatccgtaacctcagtgcaggggaggtggagacaagaggatccctggggcttctgcaccagccagtccagacaaatcgaagacttctagattcattgagagaccctgtcttttattatgaagatgatctaattgtgtgggggggggtgtgggggtgtgggtgtatgctcacatgaatgcaggtatccacagcccagaagacggcatcagatctcctgtagctgaagttacaacctatgtgggtgctaggaaccaaactcaggtcctctgtgagaacagtaaggaatgttaaccactgagccatttttccagccctttaacagagcccaccttaaaaagcaaaaacaaaacaaacaaacaaacttctcagagaaactgagggagacacatgacatcaacacacatgtgcacatgtacttgcacacatgagcgtgcacacgctcctggcaaagcatgcattcttctcttcccactctcctatagtcaaagtctccatgcgtccactgcggacggtctggatgcagagagcatatggtgcctatgctcactgcgtatctcaggcacaggacacctcagtgtatctccaagagcagcaagcttgtatccccattattggagactatcttgctttgctttttctatgtgagtgtacttggaggaagcaagccctccctgactcaggctaccagttgtgacctgggctctgacttttctagaagtcaagtccatctgtctccaaggactggctcatttccagggaaagatgtcacgaagctggacagaggatgctgcccacggcagacggtaaaggcccccttcttcctttctctgcgataactgtcaagacttctgagccaccctgaacacagctgtggcgcctctgtgcttcattacagaagcaatttggttgccataatggtaatgagtttccttgtggataaggagaggacaggtggccaggacacttcagtttccctaattgaatcataaatagaatgatctctgtgcagcccataaacccagaggaaggagccatgtcaggatgagttattgtccacatggtaggtaacacttgctacacacatgagagagttcatacagacgcatacacaagctagagacacacatactccagcaagccagagccctgcaggaaaacacggtccctccctgtgacagagacttcccagtgcgggctgaggatggaaatggaaccctcctggccctggaagaggtccaccacttccactaatacttgaagctttagggcatcttaaatctatggggcgtgggttgtagctcaggggtcgaaggcttccctagcaatgtacaaagatctgagttccatgcctaccataagaaagggggtggggggaccaagtggatctcatgtcctctttaagaaatgtatttcctctgtgaatttgaggccagccctcaggagtcacaagtggatctcagtgagttcaaggccagcctgctctacaaagtaagttccaggacagccaggagtgtaacatagagaaaccctgtcttgaaacacatccccacctcccaaaaaaagaaatgcattgcatagtcagcaaattcttgggacccaagttcctctagggccagaattatcagccagtgaggcaagtgtgtaagtctcggagcctgaatgttgctttactctggaggcttcaaggaggccagaggactggagcagttgaatgaaggggctggagcactccattccctgctgtgaaataatgtcacaacaacaggggaatcacagtatgtctgtgcgtttgcctaattacagcttttaggatttttcggttttgtttttaatccctcttccccagaggcacctcgagctctggtctgtccatgtctgggcttcacaggactcagctccttaattaatctgataactaattagagatgttgctgtaataggaattaaaaaaaaaaaaacagagctgggatgctgggatgtagttcagtggtaaagcacttgcctcgtatatgcaaaggctttagctccaccccagcaccacaggaagagaaaggggtagaggtccatgccttcatcctcagtatccgtttctgtttctggcaagtatttctggatgccacctagtgactgctgtttctgtactatccttttccagaagcaccctctccccttagagggggggtatatgcaaatcctaacttaatgtctaaataaaggacttgtcctgatgagccaaaaacagactccacaaaagtatctccaggttgttccaggtgcctgcaacctggcatggaactggcatgatggaaacaaggggctgaacaaattttcccacttattctgctcagggatcctgctggaaaactccagatacgctggaagagagagctcagctggcatttggaaatgaacacgcctgtcttggagccaccctgaccacctatgggtactgacaggcaggtgtgtgctgctggtgccaaactcagtgtccagaaaggcatgagcccctgggcaaaaaccattcaggcctggcagagccaagttaccacaggtgaagttaaggctggtggagaataaagcaggtttcaaaaactacaacttttctgaaatacactaagctttcaagtggttcttaagggtactttcaactaacccagtttgctttttatagctgactttgaaagagtttggctctactttatagaatcaaagactgttacgccaaagcgggggttagtatcataaagccaagtcttttcaagaactaacgagttggtggtcagaagacagcctttggagatgagcagagctgggttccagacctgacacccagaaacagaacccagagctcatccaccagactgcaccagattccctggtgtgcaacaagctgactccaagccgcaggcaccagagatgaaagcccaccagatactggggctgtacctggtggtgcattcacccatctaccctacatgagaaactcagccactgcccacctcccacagagcaagaggtccatacatggtaacatggtacttgcacaccctgcagacatgctggccaacacagcgtttttgtctatggtcagagataaggacccaaaaatcactggcagatccctccacccccacccccggagtcacgggaactgtcacacttgactggcaatgtattgattgcaagagctcagctgacctcagcaaggaagctctgtaacaactgtcagcaaggaatagaggaaggaccaggacaacatatccttctttattctgttctttaaaacctccgctgtcattcgtgagcccggtgacttgtggggactctccctgcccaccacaggcaccactacttaccgcatggacagggttacactggtctatgggactcttaaaatccgttcttaactcgtcaaaggcgatgatctgaaaaagaacacactcaatcaggatgctgtgcacactcggtcagcgctgctaccaaatccttcctgcagccccgcacccagacgccacaggaggaaaggacgggctgcagggggcacaacgctgcccaggagctgaccactgccaaaactggcaagggacgcagggctgtgttgccttctgtctacggtgttggctttgaaacttctcacgtaacattttttaatgtttctgattccatgtgcagcctgtacaaagatgtagaaaaactattctgatggagtagagtttggtaaaggcataaaaaggtaaaacttccttccacccagtgcttttagcatcttccctgacagacactgcagtttatttatttattttgtttgtttgtttgtttggcagaaacgcccaaaagtaaaaagaactcagaaagaaatacagggaagctaagctgtcaccatgagaaacaacatctctaaatgtccatcagcagccccagaccggccatgcctactactgcaggctctggggctcatctggatatagactccccagggtccccatttgtcagaggaggggataggaaggtgacctcctgccacctcaggacgaggcatgtcccatcctcagaaggaaccaataaggataaaggctctcaagtcctcattctaaatccagccatcttgtctgctgggggcgggggcttaagtgacagaacacaggtgttgggcccaaggactctcctttcttggtggaggctttggtattctcagcaaagtcttcccggctacagtttggatcttgaatgttatctgaaggtccatgtgctaaagggttggcacccagcccatggcgccccttggtttgttttttgttatgtcctttggttggttggccagttggttggttggttggttgggtgggtgggtggtggttttgttggatggagttttttttttgttttttgagacaggggtccacgtatcctgggctgctgatcccccgcctccatctcctaaacgctgagatgacttgtgtgcacccccacccctgatttgtgcagtgctgggggtgtaactcagaattccaggctaagcaagcattctaccaactgagctacctcctggcccattgctatattgggtagtaaaaccttaagaattggggcatagcctagttaagaccttttagttttattccattgttttttgttttgttttgttttccttccagaccacttggcagtgcagaggcaaacagggctcctcgaccatgtgtctcccttgtcacgatgctctgcctagccacaggccccaaatcaaatcacaatgcaataaaccatgagctgaagcatttgatgacactgggagttaacccaaacctttcttccttataagttgtttatttcaatattttgtcacagtaaaggaaagatgactgaccacacccactgagcatacgtgaacgtaccctccacaaaggcacatttcagggaaccctgaacatgtggcagaaataacgaagccaggagcacccagagagctcctgactcagccccatgtggccaagtgagggtgggtgaccttactctgcaaagcagtgtatttacagcatctgtatgtccccgtaacttcaacatgtctacagcatttgaggaacacactagcataacttgagctaagaggacattcccatactacctctgatggacagttgggtatctagccagttcttcccagggtgatcactctgctgctggctccagcaagctgagcattgtcttcactggtctgacctatgatcttcctaaagtttccacccacagccaaggtcagagcagtgagccacagcctgcaggccagaccagcctgccacccactctctcataacctgtgggctaagaatgactctaacattttttaaagagttgaaaaatatcatcaaaagaaaaatactggttttgtaacatgtaaaaaatatgctaaattcaaaccttggtgtccacggatagagttttgcagctgcttggtcaagttctctttctgtatattgcttttgaagactctgaggcaggggtgagacaaatatatctgctaacttttattttttttagagaaaatagttgatccctggtctattcttgtatttgtcctctagatcagtgtttctcaaccttcctaatgctgcaaccctttaatacagttcctcatgttgtggtgacctccaaccataaaattattatcattgctgcttcataactgtaattttgctactattatggatcgcaatataaataattttggcaataggggtttgccaaagaggcacatcccacaggctgagaaccactgctctagagggttggtagcccatacagtggccaatgaccacatgggctaatatttcagttaaactttgtatggctcagattgtaaagtgtttgccacaaaagcatcggggagctgaatttaacacccaacatccctgtaacagctggagaacatggtaataccagaacagggaagacagaaatagggggatccctggggctggctagtcacccagactgtacaaatctgtgaactccaagttgggtgaggtatcttgtcctgcagacacaaatgtatatacacacatgatcatgaacctacactacacataagtctgttatctattgcatagctcatgcacaaaaactgttcagttcctgcaggcatttctacaggccagtgctacatgagaagcacacagaatgggtccagtgtccccgacatggagcctgttccacaattgtgtcctcagcatatctctatcccctaagcaaaatctctccacccattgtttgtacaatccagtgctagttcgtgcatcccattaccctaattaccatccactggcatgcctgactggacatgtccacccaaaaacgagcctgtcagaactgaacactatatccaaagtgagactggttggcacagagcaagaacattggttgccatccctgctctgcaccccaagcctctgtaaatgcatcgtggctgtaccatccctgatcttctttgtgtgctccagttaaacctaatccaccttattctacatgagtattgttggctttgggaacctgagagcaagcagtgaactttgcccctattcactcttctttaatccaccccatccaatcttttgagacataacctgtctcaaatcctgataaatgtaaatcctgataaatgcaatgtcctcagcctcctcttcagtaaccccatcctcagcatcctcagcagtatctccatcctcagcatcctcatcagtatccccatcctcagcatcctcatcagtatctccatcctcagcatcctcatcagtatccccatcctcagcatcctcatcagtatcctcatcctcaacatcctcttcagcatcctcatcctcagcatcctcttcagcatccccatcctcagcatcctcatcagtatctccatcctcagcatcctcatcagtatccccatcctcagcatcctcatcagtatcctcatcctcaacatcctcttcagcatcctcatcctcagcatcctcttcagtatccccatcctcagcatcctcatcagtatccccatcctcagcatcctcatcagtatccccatcctcatcatcctcatcagtatcctcatcctcagcatcctcatcagtatcctcatcctcagcatcctcttcagtatcctcatcctcagcatcctcatcagtatctccatcctcagcatcctcttcagtatccccatcctcagcatcctcatcagtatccccatcctcagcatcctcatcagtatcctcatcctcagcatcctcatcagtatccccatcctcagcatcctcatcagtatccccatcctcagcatcctcttcagtatccccatcctcagcatcctcatcagtatcctcatcctcagcatcctcatcagtatccccatcctcagcctcctcttcagtatcctcatcagtatccccatcctcagcatcctcatcagtatccccatcctcagcatcctcatcagtatccccatcctcagcatcctcatcagtatcctcatcctcaacatcctcttcagcatcctcatcctcagcatcctcttcagtatccccatcctcagcatcctcatcagtatccccatcctcatcatcctcatcagtatcctcatcctcagcatcctcatcagtatcctcatcctcagcatcctcttcagtatcctcatcctcagcatcctcatcagtatctccatcctcagcatcatcttcagtatccccatcctcagcaccctcatcagtatcctcatcctcagcatcctcatcagtatctccatcctcagcatcctcatcagtatctccatcctcagcatcctcttcagtatccccatcctcatcatcctcatcagtatctccatcctcagcatcctcttcagtatccccatcctcagcatcctcatcagtatccccatcctcatcatcctcttcagtatccccatcctcagcatcctcatcagtatccccatcctcatcatcctcatcagtaaccccatcctcagcatcctcagcagtatctccatcctcagcatcctcatcagtatccccatcctcagcatcctcatcagtatctccatcctcagcatcctcatcagtatcctcatcctcagcaccctcatcagtatcctcatcctcagcatcctcatcagtatccccatcctcagcatcctcatcagtatccccatcctcagcatttccttcagtatctgccactaattatgggctccaaatagggccctggacagagacttccacctggcatccagcaccagggtggctaacatcagtgcttcctgggcctgatatttatccagctagaaagacagacaggtccccacattttgatcctgttcccacccttgcctcctgcctgaatctctgtcattgtactagagagtgcaggcaggtgaacctgtgttgactggtgcaggggtggctggctataaagcaggacagaggagcttctggcaatcttgagacactcagttccatgcctgggctccaacctggaggatgatggaaacagcaggaaaactgtggatgcagcttatgccagtgagttccacccctttatgagctatgacctggcagcttcctgtcatggccagggtcttcagcatccccactaccccaaagtcacagctgaatctgtctactcaggtaaaaacttcaggaggcatcttttatactcaggtcctgtgctggcaacttggagttactaaactctacaaaacgtagctcctggcctcataatgtgccctgtctatggcaatatgggacatgcacacaaacagatcattgtagtaccagtgtaataagggccagaaacaagaaattcactatattcctcacagggtcaccatgtcaggtattgggccatgtactacacaatgtgcatcatttgatccctggactccccattaaagaggtctattattgcccccaatttagagatggagaatgacgccaaatgtggccaatgactctagtgccagaatagaaaccaagacatgaatccatgcagtacccataaggctgctccacagaataaatatggagcaggaagagaggactctaagacacggagaaggatgagcagctggtcagggaaacacagcagtgtcccagaagagagatttaggccatcctttgcctgtcctgatggtgatcagcacactcctcggccctgcctcctgcttgtgtctgagaacaggggcagcatggcagagagcaatcctcaggctctggaacctgtgagtatgagaggcacaaggacactgctgtgaatgaagatggctagatgaattgctgtgactcagttatgcacacttgagccttcaatgatccattgaagcatacagcccagccccaaacagtaccaggtgaacttgaactcctgacccagtgatacagtcacggcaaacctcacgctcatttttcaaaatttaatatactaaaattcacccttttaatgaaagctcctaaggtctcagcaaatgcacagtcctgtgcacacgctgtgatggtgatacattgtttttattgctcctcatcccttcctcctgactctgagagtcaactgctaccccacccctaacactgtttcctgtctgtcaatcaccaatgtctgcttcatctctaaagctttacctttgtcaagacatcccagaaatggaacaatgaagcacgtgggctttttgggcagcttcccttgacaacgtgttcaagattagccatgtcactactcatatcaataacacgccccttttccctcctgagctcatatcagtaacaccccccatttccctcctgagctgtacaaaggtctaaagatacactcaagttcacctatccaatccaccagctggaggatgcttgcgttgtccctagattttgacaattgtaactagagccggtgtcaacctttgcatagaggcatctgtcgttgtcccgtccgcccctgggtggtaggggagaaactgctggatgatttgatgagtgttacatctaggtttgtggggaactgataaacttttccaaagtatctgtaacattgtgccaaacaccatgtgagagttccagacacaccacatccaagtcaaaaaactatgatggctgattttgcttagctgtttcaataggtatgtggatgaagccagtgagttatgacactgggatttttttcatgggcttagtcgccatctgtgtgtcttcttcggtggaacatatgtttaaatcattggccccttttgtaaaaacaatactaacaatctgtcttcatattgatgatttcttttcctcactggggatggagcccagggtctctcacacgctacacgcaagcactctaccactaaggtccattcctggcccatttttttccctttcctttttaaaacatttgaaatagggtttttctatgttgcccaggctggccttgaatgaacagagcaaaagattttattgcaatgcttgacaactattcttttatgtaccacacttttggttctggactcaagactcacatggatcttaaaatacttgaaaccacaaagattttccttgcctgtggggaagtttaaacctcaagcttaatttcaaaaacatatttaggattactctggcagtctcactcctattacgtgaggtctgtacactcactgctttaaggaactggcctgttccattgagttgttaaatttagcctgtttaatccaatgtccattgttaccacccacccccacttttttcctcagacatttgagatggggatttgagtgagtataagaaaaggcaggaaggtccaatagcagagcagtgtgaatagagaagaggaataagtccccaagatccaagatggccaaggtgtgtagaaccctcgagactagaccctgcctgagcacacaagactaagtgaggctctggagcaggaaaccaggggcctctcaagagctgctcatgagggaaggagagagaagtctatgttggggcctggtgcaattctgagctggatgctctagaggaaccatagctgtggttcagggcaaccatagagaaggaacagggagggaggggtaatatactgaccctggagctctttctacagtgctggacccaggccccaccacccctagtcagggtcagtcttctccaagtgctcccaacacaccggtgatgatggaacaaagatggctgccaaatgaagccctgtggggagcctccccagaaccacagcagttccagtcccacttgtgtctacccttcctccatccagcccagcctgagaatcaggaggcaggcatctcagaatcagcttgtgaagtggggaaacacactccctctagaatatgcccatgaaccaggtaaactgctaaaaaaaataataactgcactaccacaaaaccttgttagaaggtgaaatgaccaacatctcaccctgcatcagctggtgagttcccatgctgcccatcagaggttagcatcaggagcatgagtctggaatcttctcttcccaggtcttctgtgacactacttattctggttgaagctaccctaccttgcattcatactgtgttatcttactaatgtagattaatctgcaggaaaactctgtggatgtgacagggacttcctctggaacatagtacaggaaatataggcccagtgagagttttaatgacactctcaacatcacaggatgagaggggcacaatcagcacatgcctagacacgagctctgagccagacaggactccatccagcacactgtgcccactctgtgacttgaaagggtaaaagaaagtgttgagttactaaagatgaaaaaaaatcttgactggatgcccaggattctctggcaccattctttagctctgacacacagcactgatgaagaagatgaggccctttgtcaccactgcaattataatctgggcagggagctaattaacaaacagacaagaagatatcagaaaatggtaggttaggtgacaacaatgactcagttgatgtgaagaaattagaaggggtgggtggtcaaggagagtctctctgaggaagcatcacttatgccaagaaagaaaactgagcaaccaggaagtcagacacggatctagtctcacctctgttgctctgtgtgtcatccacaaaaggtaacataagcaaggaagtgtttacttggctcatgattacagcttataatccgttgttgtagggaactctaagcagcaacttaaagtcccacatccacagtgcacagcagagagagaatacacacatggatcctagtctgcttgctgcttatgtaactttctcctctcttaatgtacttcaggaccccctgcctaggcaatggcactgcccacagtgttctgggtctacccatatcaattaacaatcaagactctgccatagacatgaccataggccaacctgatctagacagtccctataactctaggacctagactctagggtatgggctggagagatggctcagccattgagagcacttgtgactcttccagaggactcagaattgattctcggcacccatgtggtggctcacaatcgtctgtaaccccaagggtatccaaagccctcttctggcctccacaagcaccagcacacatgtggtacacagacatacgtgccggcaaaacatccatgcacataaaataaaaataagcacatcttaaaagaaaacttttaaagagtctacgttgtgtcaagttgacaatgaaaaatgacctgcacaattgaggaagaatattccagagaagcaagctctgctgtaaggagtacaaagcttggccatgggagacaaagaagggccagcggggaacaagatgggctgtgatagagaaataaaaacacagcctggtgcaggaacaaaccaggaagggacctcactgcagccctcacatggacaactgtgggatgtggtcctcaggtgacttgcagggctgctcacactccctcattttaataagagttgcacaaatagaacctggagggaggggcaggggaacatggagaacaggtcaacaggaatgaaaccaggatgggttatgcagaggtgggtggtggccttttagatcttttacctaaatagaaagtcaatgtgcagtgtcctgaacccagcaagtcagactcaggaaattcatcaggctgggtaccagcactctgccatctaaggtcccaaacaatgggtctgcttagccctacatgaccaagagctaatgagaccaaagaagggagctgaaagccaataccggaagctgagtcttgtcttaactccactggttctcatctgactggagccctttgggaaagcagaagcgacacaggggacagcttgttgctgtcacaatgcagcccccactcttatcatgtcaagagatccctgtgctgtggcctgccaagaagatgggcccaggccaattccatagcagagtctaaaggggaagggacccttagacatgacctgaatgggccgatgattgaggagaaaatggaacacacctttcttctgtccgatattcctccacatctgacgcccccaccaacaccccacattcaacccatgatccccttatctcctcatgctgccaaacagaatatatcttaaatggccccaaaggcccttgtgtcaaaggcttggtctccagtctccagtccgtggtgctattggaaggtgggagtcctggaggaggtggggcctagtgggaggaagttaagtcattcagggcatattggttgggactccagcccttcatatcctcccttctgccctctcctgccctatcctgctccttctttctcccttccccactaggcaagagctttgctcaagcacaccctccctatgcctcaatacaggtcccaaagcaatgaagacactgaccaccgaccctaagttccaaactatgagtcaaaatctcccttcctgtatgccagtcttgccaggtaatcacagccaaagaaagctgacgcagccactatcatcctatggtcccctcatctgccattctctcagacacacctcccaaatgtccctcgtgtcattacaagctgagttacccttagctcctgtgtctcccattttcccaggcaccgccactacaaagaggagtcctcctcaagtctccacctgcccatcgctagctccatggccttgaacataacctccacctccccagactgtgccttctttgtttataaaacagggagattgacgttcctccctcagctggctgtgggagtgtgatgaggtggcagagcctgctgcacagagtgcagactcccattgtgtccacactgagggacagctccacagggagctcaggcacactgtgtgagtcacaggtcctgctggaattcagtctctgcctcactgatttgtgtgaccgcaggcaagttttattaacctttccaaacttctgttacctcacatataaagaaaggacaataatagttcctacttcagggccattgcaaggagtaaaagaaacaatgggacctagagaaatggctggggcaataacatgttggccacactgaagtgcttgtcacttcatgcataagggcacacttaaatctctatgtgcacccatgcccacccacacatgtgcatacatatacatgaaaacacacataacacacacacatacacacacacacacacatacacatacacacacacatacacacacacacacacacacacatacacaaggaaaaaaaaattacataaagcaagagacccagggcctgtgctcagtagagaatgatgccactttcttaactggttactgtccctcagatgtttgtcccatgcctctgaccatgactcttccctccctggtcttgggcagagtcatcagctgtgtaatctgagtccagtggaagttgtcactgtggcaaaggcaaagatgggaacacaggggaagcaagtgagtgagaaagactgcagggtccaccctgtcacaggtggggactgggatcagctgacaaacaaaagaggcctcagctgtcccggacctacatggagatcataacgggaacacagaacacactggcattttcaaccattgtctaggccagaatctgcaggtgcagctagttctgatgctgtgtcctgtgtgtctgctggccatccagtgaccagcagacaatgacagctcagagccctgcatgtccagatggatgccatcagagcaagaccgtggcctgcacccagcccggctgatttgctgacactccgcagagccatcctgcctccagccagcagccaccaggtcagggaaagtccagggagatgtagataatgaggacagctgtgcacactgacttgttaacggaggtgacactgtcactgagcagcaggagtgggggaggagcagcagcctgtagcactctgaacctctctgccatgcctccatccatccccaacactacagccagaggttgggctctgggtaactgtccccagcctagatgaccctctgtctaaccagactcatgcgttttctggtgccttgagttcttgccactggacaaggcaaaagatctgctcctttcctggttccaatgggctctgttctttggctaagcaagtccctctccaacacccagacctgtagtgcctgccatccatgaagaactggttttgtttactcctgctggtacttgctgagcagggaccatgcatcagggccagtgctggaagcaatgtggattggagccaacttttacctacctgatcattctgcagtaacctggagccacagtgactctgggggtgggcaccccactgctccaggcttcaatttgtcgcctgaatagaagacttccaacaaaactgaagatgaaggcatgacggagggtggtaatgtctgctggggccagggctgccattttcaagcctttggtggtgaatttggccaccatgatgtgaccgactctgagccaccctggcttccttgtgacaatgcactgagcccctaaagctgtgaacaaaagaagtccttcctccttgagattatcagacatttgttataagaggaaggtaagcaggatgagagcagcttcctcactcttcatagactattgtaggggatcctgtagccagcccctgctacgtcaccctgaccatgccctcacaggcgtggtcaggcacacctgtagcctgtagcacacctgtagcacacctgtagccagcccctaagcaggcgtgactacagcatcccctacagactattactacataatcaccagtgtaccctgtgtgtggtacccattttcttccaggacccaagcccataagggactaaaggctgggctcaagtagaattccctaaatactctggatacaaccagcccatgaagtgatagttggtggatcaagtctcagtgtttgactgagcccaggaatggaattcgcttggcctaggaaacttccaaacaatgttttttgttgcaacatggtcattttgcagaggtattaaaaataaatcttagcaatgcacccgcagaatacctaggtttgaacaacactgcttcctaatggattctgaagaatggattatcttctgagtgtccccaagtgtaactacaggaagtggcctgctgtgccctataaagctgctggacttaaccaattaaattggtttgcaggacattggctgattcttgttttagaaccaggtttcacacagagtctaaaataagtgcctcttgagccccctcttcatttaagttaaaaaggaaggagccctatatagtctgcatatagaaaacccggcttattcaaatcagacaaaaccaaaataagctccctaacaagaaggtgtgagcattatccaaaattggaatctgaaaacttaggttttaaagacaacaccattgccttcctttgttccagcagtgcagatgaccatctaggacaccagactggctctaggaggaacgtcagagcactgcagtgaggctggatgccgatccccagcgcagcacccagtgtgagccaggtcccaggcagccgtcactggggctcccacagcttgttgagttcatagagtggaaatgaaagagactgtaaagacctgtgtagatatgttcatgaaagaacgtgtgaaggtgagccacagatacagaaatggactgggggtgtcttggtcagagaagtgctcgatccacaagctcaaggaccctggtttgatccctgggtacccacacaaaaagtcaggataggcaaatgcttgccaccccagcagtaaagagatagagaagggaagaccctggggtttgtgggtttggctcagtctaatgaacaaaacccaggtcctagggagagacccagtaccaaaaaactatacatgtggatcctgaggaatgacacccaaggttgatatctggtaggtgcacacagattcacatagaagaacttaattgcacacatagtgtgtgtgtgtgtgtgtgtgtgtgtgtgtgtgtgtgtgtgtgtgtgtgtgtgtgtgtgtacatatgtgtgcatgagatttaggaaaggaatacagaaatttcaggggagtccaatttctgcctggttcccactgtctgggccttctcaacacccatgtaacaaggctgttgagactgcccctcccccacactgccttttgcacatgagaagagaaggctgggggcatgctaggcaagccttcatgtggacaggaagtgtggtaacagcccaagcccctgagcttagctggaatcttctgacaacccagggcatgaagagccctcctctctcaaccaccacacggtgtagggcttgctggctgaaatcagagcctgcctgccagagccaagctccactcagcacctgcctacctctctcacacaggcctggccaagcttctccttgccccacctccctccttcctacatcactggcatcgggcaagttgcaaagtgactggatatctgaaatgggataaccatgcctctcagtagaattccccttggctgtgtctgcctcactctcatcaaacttattagatttggtgcgcagagcatccagactgcagccaaagattttccatcaacacgccccctggttgatctgagtccagggtctatgtcttccactggctcccatctggtcagagcagcacacagagaagaagggtctctgacaggccacaggccagttatctgctacctcacaaaatccaaaagtcacaggtcagactcaaaggtatcaattcgcactttgcaaaaatgttcaataatgtatgataaccttgccaatggactaaagaatgcaaatgagctcgcattgagacctaactcatgggaagacagattttattatagtaaagcagagggaggggaccccaactctgctggtggtggaaatgggaggtgatggagccaacagagaacaatctgaccgtgctcactgttaatggaaaaagcatatgtccttcatgcaataattccctgctgagcatcctttggctgctggaataaagccaatgctaggtaaggatggatggatgtcccagcattgtttcagatatcaaaataaaataataataggaatgttcatcaatcagcttacacatgattgaagagacagtgatgattccaactgtggaatactatgcagccccaagtcagatttattcaactaactgggctatgattctatagggaaaagaaggtgtggagacacacatacaagtcatgtacgtttgcacaggatacatgaacttgagaagcatgtggctagtatagaacaggctgcttgcaccccctgctgtgagcatgggagggacagtggtcggaaggagaggtgggtgccttgacttggggacatgggtaaataacaaaaccacagaagtagttttaaagcggtgcttacaaataagtaaataaataaatgacacgatccgattccttctcattccatttgtgtgtgtatatacatactgcgtatgtatgggcaccagagcactgtttgcagttttacaaagtcagtccttccccaagctatttcactgtttttatagtcgtattatcttacccttcccgaagcctgttgccgctccagactctgcctcaacctcattagccccatgggaggcagctgcctgcgttgttccctaccctcagatccgtgtgtacacagtccctctttctccccctttccctcagtctccttcctgtccttctctttccctctgctcgtctctctctctctctctctctctctctctctctctctctctctctccttctctccctcttcctccttctcttccctttcatctccttcccccactctccctctctttcactccagcccatcttctacagggagaggacctcatctgcatagccacacagagtcctgcagctcgctctaggggacacatgaagcacccaataacgtgtgtgtgtgtgtgtgtgtgtgtgtgtgtgtgtgtgtgtatgtgtgtgtattgggggaaatgtgtgtacatgttgtattttgtgtgtttggtgcattataagttttatatatgtgcattgtatatatgcgtgtgtgttgtcagtgtgtggtttggcatgtacagtttgttgtgtgtgcatgttgtatatggtgtgttgtgtgtgtgttatgtgtgctgtgtgtatgtatcttttgcgtgtgttatatgtatgttgtattttgtattgtcatttgtatattgtatgcatatgtttatttgttttgtgttctttgtatgtgtgttactgacatatgtgttatgtgttatgggtgtgtttttgtgttgtttgtttttttgtgtgtatctcacctatatatgtgtgtgttatctgtgtttgttgtttgctatatatatgtgtgttttgttgtttgtgaagttgtatgtgcttgttgtgtgctgtttgtggtccttatttatgtttatgtgtatattatgtgtatttgttgtatgttgtatacatgtgtgttgtatgtgttgtgagcagtgtgtttgttgtatgtgttgtctgtgtggtgcatgtgtatatgtgtattatatgttttttgtgtgttgtactgtgtgtatgttgtgttatgtatgtgttatgtgtgtatgtgcagtgaacatgcaggctccttattggctcctttccattatccaaaggttccagcctgaccctgtgccttgaggtgtgggaatggcagcagcaacagtgggtccccagggaagcccagggtcacgtccatcgcccactctggagcggggctctgatgaagctctgaaccaatgtctgcctttcggaaactctggagagctccgttcatgggcagcagtgctgtttgctagaactgttaaactggagcagctctcccttccctcccgtgccctccccacctctgccaacttgagccaacacaacagtccagggccccagagtcccagagccctgtgcaggccagcagggcgaaggctgctgccctttggcaggagcacagccaggttatttggccctggtgctcattttcatattcttttacataaatttgcatgttggccacagagaacaaacttcaaggatttaaaaccaaatgagtttcaagaagttctggtgctctgcatccagtcagccccctgcttggttggagcacaggaagactctgtctccttgcctgaccagggttctccgctgcagtatgcaaacctaagtgtgtgtctgtgaggacatctccacagctatcgagtcacacaggctgatctaataaggatggatcctgtgaccgattcctaacatggtgacattaacgggacactgaatagttagtgtgggtacctagatggaagaactagtttcctgggggagtgacctgaggcctgagcttgctgtaggcctccctctctgctctctgcctgccaagaagtagagaagctcctccaccacacacccctgccaccaagaccctccaccatacacccctgccaccatgaccctccaccacacacccctgccaccatgaccctctgccannnnnnnnnnnnnnnnnnnnnnnnnnnnnnnnnnnnnnnnnnnnnnnnnnnnnnnnnnnnnnnnnnnnnnnnnnnnnnnnnnnnnnnnnnnnnnnnnnnnnnnnnnnnnnnnnnnnnnnnnnnnnnnnnnnnnnnnnnnnnnnnnnnnnnnnnnnnnnnnnnnnnnnnnnnnnnnnnnnnnnnnnnnnnnnnnnnnnnnnnnnnnnnnnnnnnnnnnnnnnnnnnnnnnnnnnnnnnnnnnnnnnnnnnnnnnnnnnnnnnnnnnnnnnnnnnnnnnnnnnnnnnnnnnnnnnnnnnnnnnnnnnnnnnnnnnnnnnnnnnnnnnnnnnnnnnnnnnnnnnnnnnnnnnnnnnnnnnnnncctccaccacacacccctgccaccatgaccctccgccacacacccctgccaccatgaccttccaccacacacccctgccaccatgaccctccaccacacacccctgccaccatgaccctctgccatacacccctgccaccttgactctccacccaatcacatgaggccaagcaaccatagactgaacacactgaaacggaggaaaaataattcccattagattgttctcagttgctttggtcttagtgaaataaaaataaccacttcaccctgaacagtaccagcttgtcccagtcacacagaaagagtctccccagttacctggtaactggaagggactccacagcctgggaggtgagcagagggtgtgtgcagagggtgtgagcagggtggtcacatgcctggtgagggaatcatcatttataggacactcaggttgcagacaaagctctgctttggctactgagtctgacacacacactctgtgcccaaacaaggtctctgccatagacaactgtgcctaagatctggtggaccagagtaaaaccacacttggcttactcataatttctgctgtttcagacatccagggttcttttgtcattttttgtttgttttgagggtattttttagccttttattatattccttctaatcactttactcaatactgagtttcctaaagacatttttgtacattcataggattgctttaagtgtatttccaacctccgccacacttaaggcacaacaaaatgagtcatcatcccacccagctctttaaacttggaagaattcagcgtggtggtggtggcacacacccttggtccaggcactcaggaggcaaaggcaggtggatctctgtgagttcaaggccaagcctggtccacagagtgagttccagtatagccaggactaaacagaggaaaccctgtctcaaaaaacaaaaacccaaaataaacaaaaatcttgggaaattctcctgaacttggatttgcaataagtcaaacatgaaagtgagaggctgacttggacaaaaggaggaaggccagtcttcaaatcctgctgggacagacatacaacagctgcactggactggagaactgatcatcttacaatacgaagaagaggacccctgtggatttctgtgggcagtttttttttttttttttttttcccaaatgtctgtctaaatgaagccaggtagaccagatagatctcaagcagcactgtagggcttcccacctctgaggtcagagtcaactaaccagtggatccatcacttgcccagtgaattatactcagcacttaaactgaagcaatctttgtgctagaaattaaggatacactgtagtgttcgtttcctgttgctgctataatcgatcattgtgaatttagtgcccaaaagcaacacagactgatcctatagttctagatgccagaagtccaaaatgagtctcggagcactaaaataggttgtgttcttttgcagaggaaagcctatttccttgttcctttgagctcttagaggctgcctgcttcccttgacttgtggtcccccaaaaaaacctcgtcaccatgacctctgcttcaggtattgtatctcctccacctccctgtgcctcttcccactggtagagactcctgggattacattagctccatccaggtagcccagggccattttttcatcttcatctccctaagttattcctgtcttccaacactgttttgccatccatgtaaggtaagacactcaccagtctcagaattaggaggtggctgccttggggtgaggcactgttagcctcttgcagatgctaagactcactaataagagccaccagtggcaggcgggcttcagaggcatgaggtgtgcaggtgtgcagggcagccgtcactcacaacccaggggagatcaagacttctgcccctctcgtttctctccgcatcttgtagagttcactgtagtttgtgcttataggactcgaagcccctctttctcctctaccaggaaggaaggttcctaactggcctgcagaatctggggaccttgcttgcttactgacaaacaggatcgttgtacactagaatataaatatgcccttgcagggggcgaggccttccatccagattccttcaagactacggcaggtgactgcaccccacacctctaactccaacacaatctcagggtgcaagcttctccctgagccccgacactgcccgggatgcctgactggcatctgtaccatgtgttcactgctacctccagctgatgcgttccccgtgagtcccacctgctccccacttctaactcactgggtccacagcctcttcctcagcccctgtgggaggctcaatctcagacacccagagcacacccaccacagacctccaccagcacccacactttcaagtacccaaagccattagctgtgacctctgtctcgcctccatgcctctgacctgggaagccacatggcccatggagccccgggtttgcagcttagtgcacaaaaaatggagccactagcagacgctctaacacagttgggatatttcctcttctttcctgtgcctcatttgctcccagtccactactgttttcacctctgtgccaccgacatactaattcttgtccctgcagcccttgtcccactccagctctgcccctttgagtagggtcaaacatatttatgcaagtctgtgtgctcactttctcctaggggctcaggtccagttagctcactgttttagctcttaccataatctctggtcttggttaaggatttcctgtcactgcctgagacccacaatggctttctcagtgttcacctgctcttaagtccccacccagcccaagcaggggactggtctcaggcactaagcaaacccccccatttcccaaagttcatactccacagataagcctaaacaccctgatgggttggactaactcctgcccccttgtttttcctcatttcaatgtgctaaaacactcacatcaacacaccatctgtaatacccccagtcaaatgtgtccttggggctctaaatgcagctcactggtggagtgcctatatccccatcaatgaaaaagagatgaccttgctctaaacctgcactgctggaccttgctgtcttatgttcaagtagcatcttttgcagtaagatccctgaagattaggtctttatatgccctgcaatctccaacacagtggctgacaaatgggtgctcagtaaatataaatgcaattaaacacagcttgttttcccaaaagggctgcctagcacagggtgagaagtacctgcatactgccaagggcaagaaattatttgatttatgaattaaacatggcccacacttccttcctcattctccctgctgcttcctgccctttggccatttcagtcctgattcattccttcagggaaagaaggctacagaaagaactttctacagcctgagactcttccactcacagaggcagggaaacatggtgtgggggagtggagaaactgactggctttgggacgtgcttctctttagatttctagactacaacagatggaaatctgcactagccacagtgagagctgtgcctgccaccacaaatgccttccaagcctgagcctgcctcacatgtcacactccactggagctgggatccgggtgagcctcgacgtccatctgttagacacttggccctagctcgtgatgtgctgaaggcacaagagcctttaggaatggggtccagagatcagattgtggcctgctcaaactcatgccatattgcataggacaactgctttgggggtgtgccctgctagagcaactatttcacaaagggtaccctgctccactctgcatgcaaatgctgagagtgacccactctacatcgtgtttgtgggaggaaacagccatctctgtccatgagacacagactaataaacaacttatttacgtaaaagaagtattaaattgagatcacatgggcatatctaaactgtattaggaaaacctgattcatgcacttatcagccacaacaggccaaggaaagatgcaatgccctcacctgaattatgtgtctggaggaacgcctcacatgggagcccatcctccaagctgtcatcagacggtcagtacctgtgtcatgggatcaacagacgataaactcctgactgacccccggggctcagctcagcacagtcccctgctggatacagcctactggaactgccattcatccagtctggcatttgacagcttggtccctgaacagctccacacctatggctcataaaactataaatccctgtggatatccttccgtgtctaaaccagctctctgcctgtgccttcgatgtagcttctttgagtcctccgggctcttttaactctttgctggccactctgtaaccccacttgcatgtcattgtgtgaagtgtaatgtatgacctgagaataattaatgttgggctgaaggaacctgcgactgtcactggccatgacagctaagtgaaactggtaataccttgtgagtttcacagcttgtgggttcatttttattccatgaagccacacccccaccatgtgtctgcacgtctcacaacagtggacttagtgaaaagaaattaggtcactgggggcatacctttggaggggatatggaaaccccggtcccttcccagtgtcctcatttgcttcttattccatgaggcacataggcttcctctgccacaagctcctatcgtaatgttctctgccaggcccaaaggcctggtgacgaggaccaagtgacaacggactaaaagttctgaaatcataatcccaaaataaaccctccctccttcaagtcagttgccctaggtactttgtcacagtgaaggagagctaacaccctaagccggaacaggacctaatctcatcagcatccatacactgagggacaataagaccatgccctctatatcatgggagagtcacgtgaccctcctggctttgactctgtcacagcaggctctgcagcaggacacgatccagtgcagtgctggacaagagcaaggccaagaggagaacaagcctctctgtcaccacttttgggattggccttctagaacctggatgtctaccctgggagcctgagaacaccaagaaatgaccagatgctaaacaagtcccaaacaaacagcccaagaggaagctgggggtgagggcaggagaaaagatgcagtgcggaaagagaagccagttttccttcgtggagaactctgtccgtctaacatgtctgtatttaaaactaaaattaaacaagccattgactgaaaagagaaaatgagttcaggttgatactgccttctgctccaccacgctcagccaccctgccaagatctaaagcttccattgcccccatcagccacacagacctcagccactgtccacacagggtgtggaagctacggaagccatcttcttcccgctcccccactcaggcatgctgctaccatatctactgcttaagtcagttttcaaagtcttccttgcttggcctgttcagtccctctgaagacccgtgaactcgagggtgtcctgtcattgtgtaaaacctcagccctctagtggcagtaggtgagcattgcagtgtgttagagggggaactgggcctcaaagagaagaaggctgctccaagagcactgtttagcaggataaagggcacaggaatcgcttacagcagccagaagaaactgagaaagatgcatgagggcacagccaggtgggtgttcctggcatgtgcttttcctgagaacagaaaggcccctcacacaccatctgacattctatcgtccatctccatagcgaccaccttaagtgctaactcatccaccaagacacttcgtctcttcagcatcactgaatgcccgcttcgtgagcccttccgtcttaagggacaacagcttcacttggcctggaccattcagataccccagtaacttcaccagagcctcctgcctgcaccggtctctctcctggattccagggccgcaataaggaggtgccagccttcgctatggcatttctcactctccgagtcaccctatatgccctacccactaggacatcccagccaagttaactggccctcagggtccacacaggaccagtgtggttctagctaggtttccaatgggtttccctccgttttcttaagtataagagacttccacaatactacactccaccaaagagctcttggggagctcccaactcagatgacttcagttcacagtgacccgcctcttccttctgtccacatcactagtctcttacatcaagatggtggggctttctacccccaaatggcaggcccagtcatcacaggctttcttctgtcaccagagcgacgctgatatatgtggtcctaagactttgagaaatcatgactatcaaatagatcctgggaaaagttctatggattctgcacccacagaagggagggagccaggcagagtaaggtatcactgtgatgtgggggggggtgcactctgtttcagggccgggcatggagtctggttcatctactccctgtcttcacctggaaagtgggcataatcctgggattggcattagcggatcaggctaagatttggtgagttgctctcattagaacagagcttgctggagcctctgataccagccagtccttcacgcctcagaagagagcagcagtgtgtgtgagtgagacagaattagctagtgactctctccacactaagactgtgcctacaccaagcccttctaagcaagagatccaaggcagggccaataatcccagtgctgcaactatttcttggtcattgtcatgcacactgaggtgagcagacgtccagccgatggatgttctgcatggagttttgagatacataaggaagaaaacctcagcttctgcccatttcacaaagcaacccaagtgtctgtcactcaaccggtgataccagcaccagagaggagagaaagaatggagaggtggtcacattcttgtcatatgtgatacccaagggactcggacatcacatccgctttatccttcttgacacatcaagtagtacacccaagagtcggtcttctaatggacaaccagtgtagcggcttcttgccagtgaacctgtaactgtggccacacccctttgggcgtggcctcaggtgaacagaagcagaaagagagaagcatgaggcgtggtctcagttgtgtgactctcttgggtcagccaatctggtaggaagggcagagaagtgctcccatgattctttattattatctgactaactgttccctaataaacaccctttatcttgggtctagtgaaatctttacaccctcaccttcaaaccagtttctttctctagtaacagccaatgggaaagtgggtgcgtgggcaactgaggggactcaaggatgcagctttcatccctgtccaatgacaagagacgacaaggagctgggccttgataagggccatgaagaaaaggatgtgtgtcatagggaaagccagagagagagcgggcagagtcagctgttcttctctgagggaaggcacttggtgctcaacatggaccctgggatgtgctcaagctgtgtgagcagagaccctgcctgcctgtggaatttgtgttctcagcaacattccctgctacacagcacgacacagataatgacaaaagaggttaatcccagcttccttcagagcctgggctgatggcagaaccaggaagcaaaggtaggaaggaaggtgccaacaagagctgactctccaccagagagctctctggagatgcccagaacattgcaccagggtgtagcagacagtggagcggcaatgaaagctggtgcagagtccagagggtctggtcgggaagatgagaagggctcccagccccataaggcacaggtctgtttgctattgcagggaaataactagagggtcaagagatgcacacgtcatcagagtcccctgctgtgggctcctgcctcctatatggtggagcttgaccttttgccatccaaagggtgtactacctgggaggctcaacccagccaccttcccttgatatctctgctatacccccatcccttctacgtgtgaagactggaagactaaccacagcatcctcacacaccaattacacagaaaacaagcctcagtgtcctggaggatgccatgtgtcccattagggaagtaaatatagcacgcatgatgtatttttttaagtcatctttgttgaatgtcatctcttccccagaactacaagcacattcactgttgctccgggtcaaaggtcaagtgcgcctctcctcccccactcaccttcagaccttctgcttaggaaaggacctaagaggctgtgttcagccagctcaaactgcccctggcatatatcatccaaccactcaaccacctgcagggtggtgacacacagcagatgttggcaaagttccccagcacaacccagggccttgtgcctgagttcagcattgacctctgacaccaggtctcaagacagtggggtgccaaagagccagtgaaggggttttcatttcctttgctctttctcccatgccaactctgggtgcagcactaatgagcagagaatagctagaaaggcgagtggggtgctgaggggtaaataaattattcagtgatcacaggatccagagagacacacagagtctaggaagctctgagtcaccctggagtgcacctggcttctcccaacaaatgacaccaacatcctttgcaaagaaagggcttttctaagtggcactcttcaacccagagcactgagaaagtctgggcttctcggacctaccttctggaagaggtatcctggtctagacaagggcaggaagctgggcagagagcacacaactgccaagcctagggttcactcacacacttgcacatcagtgcaacaagaaggtcctggggcaggcaggacattgctgcggaaggaagaggggacccacacaggcctgaatctgctcctcctcctcctcatcatcatcatcatccttttcctcctcctcctcctccacctcctcctcctccacctcctcctcctcctcctccctcctccacctcctcctcctcctcctcatcatcatcatcaccatggaggaggcttaaatggagccatgaaggcagcagctaccatttcccaaggactacagaaagggtaatgctcaggagcccccaggcccctgcactcctgctgggaaagaattcactgttcagcttatcatccagggagtccatttcctaggcaacccaggagggctccctgcctcagaggggtacagagcaccttcagtgaacctcaagcctaacaggaatcctgggtgcaagaagcagcagcatcagaaacttcctggagaaatggagattgtttggaaataaaggatataatgtcatgctggagggccaggtgtctgtgcaccctgcaaagaaaggaagtgatacggagaactgtacttgctgtgggggtcttggaaggggaatgacagaacaagactcaaagaaacatgggatgtcagagcgatgatctgggcaagtgcttccagaagcttccagagtgctgggagactgacttagagttctgaacacaccaaagccttctgagaaatgatactaggggcaggagacgaggaacagcaggccactaaccctgcaacctctgccttacagagaaggaaactgcaacccagtaagttggggaagatctagcgtaagtcagaaaagaccaatcagagaggactgcacctggggacggggcgtgtgccaacgcctgccatgtcctctgagcctgggaagctaactgctcttaacttgtgaccagaatcctgtgcctactctccacagcatctcacccaggatatctctcagtgaacatgtgtcacatagacagactgctaagacccgccccaaaggctgctctgacactcaggaatgtggagtctcaagtgcagggcatccttgccctctgcaggctgcccacaccttcccacaggcatgtttctgggtctcacactgtgagcctttctctcctgtattgttacactggaaacaagctaagcagggtgctactagcttaacttttatttctttcttactcatccatctgaaaagcaaatgtgagagttctctgcaggcaagggtggcagctgccactggtgaagtggggaataggttgagggacacaaagggcagatgttagaatgacagagaggacagaaggacctcagagaccaccacacagcaccagtgttttgtccctattgactgagacggtagtgacggtaagctgacagtgtgagcaataagacctctgtcaccacttggggacaccctgcataacctggctcagcctcatggcctgtgagactatatggaatcaaacgacactgccagagagagaaggatgagacttctatgatggcttatagtgccaggtatgacccactcctgaaaacacatggccttcacaccagggataacccactcctgaaaacacacagccttcacaccacagatgacccactcctgaaaacacatggccttcacaccagggatgacccactcctgaaaacacatggccttcacaccagggatgacccactcctggaaacacacagccttcacaccagggatgacccactcctggaaacacatggccttcacgccttacacaaagactgtcaaagcacaagagcagctgataaccaactcagaacatggggaacagaggtaagcatcttgtcttctttgataactaaagatacagcaagccagggaggaaggggctgcttcccaggagtggttctgagctgggttcccaggtgtggcattactgtttaggcctggtgatcatacacctgcttcttgtatggaagcctgctcctagggagagaagatatctcctaaggacagatgagtagttagtagatggctaggtagacagagagtagatagacaggtaggctgatacagataaatgatgatagatgacagaaagatggacagttgatagataggcgatatgaagtatgattggttattaatactgattgataggtcaagagttgatagagggggatgatggataatatacaactaagatattcaaaactgtctataacaccttcctcggggctaagtgatatcttaaatatggggattagcttaacaatatcttagttataaagtgtgtgcgtgtgcgtgtgcgtgtgcgtgtgcgtgtgcgtgtgtgtgtgttcaggctagagggcaatgtcaggtccttctcatcacttccccccccccatttttcgaaacaggctctctcactaagcctggagctcactggctggcctggtggactggctacccagtaagccttcgggatccacctgtctctaccaccagttctgggattacaggtgcacagcaccatacctcgatttttacatggattctgaggatctaaactcagctcctaatgtttatacagcaaacactatccacaaagccatctccccaacccctctttgttctgtttttttgggggggttctgtttttgtttgggtcttactatatagctcaggctagccttgaacctaccataacctcgagttctgggactgcaggtaccactctgcacttctcagtttaatgaacacatttctagctatccagcctagcaaacagcctagctcaccaaatccagctttgggttgtgcaggaggtgtgactacttggcacacagatgaaaggaccaaggacatgcacccatattcttgatttatgtagctataaagcatttatggaaacagaacatgaatctgaaacataggggaccaagagtaccctcagcccgataactgtggcttcagaccatggcaccttgccacttgggttaaaggactttcagttttcaaatgagaagacaaatccagacagttctaggagtctagattcagagcagcagagaagaaacccaagccacccaacagtgccctgcagacataccctgcagcagggtggtcatactgctcctggctcagccccaaccccaagcctctcactacctgaggtttggaggactgcataactggttatggtttttcctcttgcacagaagtgctgattagtgtgtcgatagaggaagggaaaatttaaatgaggaaatggatctggaagcatcactcaggagctcagcttttcacgtggcttggggtggggcactcatgggtgtgaataggcttgcggtggggcactcatgggtgtgaataggcttgcggtggggcactcgtgggtgtgaataggcttgcggtggggcactcgtgggtgtgaataggcttgcggtgggcactcgtgggtgtgaataggcttgcggtggggcactcgtgggtgtgaataggcttgcggtggggcactcgtgggtgtgaataggcttgcggtggggcactcgtgggtgtgaataggcttgcggtggggcactcgtgggtgagaacaatagtcagcttacctgtcccatggcgactgaatcaacacatgtcccagatccctacactcatcatctttcttgtagaacccatttctttctaatcggcatgctacagctagagccgtttctcttgtggctttaactttctctggcctctgtgtaaccatcccagaatggtgagcaagatggtttcagctgaagaacaggcaacccacagctctgaggcacaataacacagctccattaagaggcgagtgatgctcccattaacagagcaaaatcacttaactctacaatggcaaaagttgctggttctgcagttctgcaagcaagtgggctggtggagatgtgggggtcacagtaagtggcgcagacagggctgaggaggtccctcctgcttggctgtgggtagcagggtacttctcagcacaggtacgtggggtcacggcaggtcagcagcagagcaaagggaagagccactgtggtgtatgcacaggagcgtggaggacagacaccaacctccgggctcattgctcagccatcatccatgtgtttttttgagacagggtctctcgatagcctggggatcatcaagtaggcagctggctggctagcaagcttcagggatctgccagcctctgcctccactgctctggggttacaggcacatgccagcatgcctaacaactttattatgtgggttgtggggctcgatcttgggtccttatgcatgagcagatctctctaagaacaagggctttttttcttactcttggttcacatggaggctgttccctccagctaggtagctatctgctgtgctgctgtggagctgcagggtgtggagcgatgcctgtcacaggggcacactgatgctgcctcaaaagtgtcgatgacaagaagccaggcccttccctatgggccagtggacagtcatcacctggggcaggaataccttcagggctgtcgcccagtgactcagtcctgctggccagaccatggcctcctcaagcccagaatggagctaaacatgatctttgccacagctcacaggatggctcacattcagggatctgtggaaacaagatagccacccttgttctagagagacacttgcttttctcaaatgtgggtagatgacgggctaaaagacaaaaacctaggtgaccaggcagtgaaggttggcattttctggtcagccacacttaaccacttccctattaactctgcaaaattctctcttgcttccactccctcagcacagtcctggtgggacagtgacccaggacccttccactgtgcctgagaccctgtcatacttagctaaaggtaaccatgttttcaatgtcctagggacagagtgactctggagcagagagcaaaagctgcttttctagattcttcctccattcagtgagtatcggttcctttccagaaatccctctttagcaatgatactcaccctacacagaacctgaggctctaagagggacaagaaaaactgaacctagaaaaaagacaggaagcaggggctggagaaatatctcaggggttaagagcactggctgctcttccagaggtcctgggttcaattctcagaacccacaaggcagttcacaactgtctattactctggttccaagggatctggcaccctcacacagacatacatgcaagcaaaacatcaatacatatttttaaaaaagaaaggaaggaaggaaggagacagtgtgtggtggaagaaggggggctccagaacttgataggtctctggtcacatcctccaggacctgcaccccacatacaaggaaacagagactcaggatatgcggggcctgcctacggtcaggagatttgctgagagtgcacagcctgtcagctgctggcccctttctaggccaggactttatatgtctaaaactgccaaccaatgggagagaactgtgtcaataccaaacagcagacttttctccagtcagcacatatgtgttactggcctctgctcaattccccatcggtctgtagaacctccaagaaaaagcagtccaggaccaatctcagccatcactgatggagtggcttcaggggacactacatctgcttcaagtcctatcctgtcttcagataatgattccttactctctaagagacccttcctcttatccaccactcagcacacgccacctctgtagctcttaagaatttgttcctgaactgggagtggtggcccatgccttttatcccagaactcaggaggcagaggcaggtggttctctgagtacaaggccagcctgctctacataacaagtttcaggacagttggggctacaataacaataccttcttttaaaagaaggaaagaaagacagaaagaaagaagaaaacatgttcccagcctaccctcccactccatctgtgtgagcccccaacaccagtctgttgcccttggcaatccagaatccccatcaaatgaaggtcccctgctccacccagggacctaccaatgacccatgacaataaggacagtgaaagtctgttccagatttcagggagcccacagagtctctgtaatagaatgaggccatcacggttgttccccaaggagcacagagctgggaaatgggaccatctacacatcaatccccaagttggtccttttgggttctggtctgtctgtgaacagtgtgaagcagtttgcaaaacagacacaacaaccagacaggtagcacaaagtccacaaacacacgttcacattgaaccactctcttggtatctagggctccccatgaaatagagtaggaccctcagaacccaccccatatcctggctctagacttcctaagtcctatttcatcttacaattccaagaattggctcgtcatttaaccctttccttacccacactcctttagagaagttactaatcctttttcctgataaggtttgcagaacacatttaaatattattttatctgagatacaaatgtctctattatatagggggccatctgggctgccaccactagccagccatgttgctatcaactctttttttagagttcatgaatcagttgccaataagaaagaaaaagggagctgatgccaagactccatctcctcccctgcacttttccccagcaggagaaacagatcccagagtcaaaacggaccatgtgaacacagaaacagaaaagatgctgaagactgacgctctggaaatgtcagcccacggttctagacatcatggcggtgggaggtggtggcagcttacttcccagccctggaacctaccagctgggctcagtgatactgtgccgatagatcagaggcacatgcagagaagaaataaaaggagcccaagagcaatggagaaacgagcagagagagaggaagacagaacatcaaaacaaacaaacaaacaaacaaacaaaaaacaaaacaaaacaaaaaacggagtggcagggagaagggagggaacctgagtccccaattctaggaccatacaacaaccacagactgctaaagcagccagccagagcccctgcagggcagtgatggggagtggagttctacctgggctgccctggatacaatgtaaacaatgtgagtgagctatacctggaaagggtctgactgggaggcggtgaatggggagaggaaggcatgtacagtgcgcctgtggcttttcccttgtgagaaaaagaatgggaaccaatgggcccgtcaaagactatcttaagtcactatctatggttttggggaccttcaatggataatcagctctgactccctctagctggacagtcttagggaagtgcagctctgggctgctcttactctggaggagagtggacacacaagggtgggagccctcagccacagcctcagggggctgctgttccactagagggtacataagccttcccacctgctcctcacctcactctgctacagcaggaaagagaacaaatgacgcacacaagacaggtgtctgggtaagcatgaggcttgcattgccatgacatttttaatagtgacagtcagcgatcgtcacttttttttttctttttgaatatgaaaggatgatttgcccacacggatgtccgtgcatcgtgtgcatgcctgatgcctaaagaagctaggagacagtgtcagatctctgggaactggaattacagatgctgtgagctgccatgtaggtgcctaaaattgaacccaggtcttctgcaagagcaacaaacactcttaaccactcagccatctctccagccccttatatcttttaatggctccggatgaaaacacacacacacacacacacacacttttgtgactcaaggcaggatttaaaacaaaaacaaaaactaaagttagcctccagattacctcccaatgaactgaaagatgacccatgcctgtgcccatagcagcacccaacataggcaacaaggaaggtgtgagccctcagctcctttacaggccaggtaaggctgcctgcctggcccggccctccccacctctcacctcagtaccacccaagggcatgctgtgcctctgcactgacttgagatgagaaatgcaaatcagctttcaatgaagtacaaaaactttttggcaagatacccttttcatctcctaataacaggtgcatttgtcaggtcatctacagccctgaactttctcagccctaaaggtatgggaaacaaagctaacctttgtttggactcccctggaataaatgggtgtggtcacaggcagactccaggaagagtggtcactctttggtttagaattcaaaatctgtgcttaagaaccatttataatttctggcaaccaaagcttaatcataagatttaaataaggctcttacaattgtttgtagaattcatgcaatagaaatcatgcaataaacccagccaggtattttctttttccaagacagggtttttctatgtagcccgggctgtcctgaaactcacttggtagaccaagctagtctcgttctcacagagatccacctgcctctgcctcctaaatgctgggattaaagtcatgagccaccaccacccagcatgccaggcatttcgatgcacatacctgggatgtcccagagatctactatggtattctggaaagttctggaagctctgggaaattggggcctcgctgaaggaagtaggttatcggaagctgcttcttataggatatgcttgttttggacccccccccttcttcttggtttcccagctgacatgatgtgagctattctgctcccacaccctccctgccatgagagaatgaaagtgagcaaaataacactagccacatcaccgccaccattgtaagaacaaagacggatgcatacacgctctcttgcttgctcacttgtactcagctctacttctccactcttacacagttcaggaaccttgcctaagtcagagtgctgcccacagtgggcgggatcttccctcctccataacttaagacaatccctcacagacatgcccacaggccaacccaacgttgacaattcttcatttaggctctcctcccaggtaattctagttcttaccaagttgacatttaaagctaaccatcacaggtaccacactatgaacacagaaatgtcagtggcctcatttcagtgttttggctttattttaacatatgtaagaaagtattactgggtagtggtggtgatccctttaatcccagcactcgggaggtagaggcaagaggatttccgtgagtttgaggccagcctagtctacaaagtgagttccaggacagccaggactacacagagaaactctgtctcaaaaacaaaaaaacaaaacaaaacaaaaaaaaggtctcctgcttgcctctcttcctgtgctaaattaaaagtatttgccagcctcatcatcaagttatacattggtattcagagaccaactcaggtttaattgtgctcttgggagttttcatgacctttatgggatttagtcagattcccagtaccactaagcatacaaagtctcagtcacccgtgaagattcagacagtggacataaacgaacccccacagcagctaccctggccccccagatctgaggtgggagcatgggcacagtttccctgtctgcagcagggctcagtcagtgcctcttctttattcagcacgattcagtttcctttctgaggtcccttcagccaccaccataagaagtggcctgaattgcaaagacttgagctggcatttaatatttgccgcttctgagccatgaggagactatctacatctggtcgcccagtggtgaaagaatggtgtatttcataattatgatcaaaaatgggtctctcaggaactggggagatggcttatcaggaaaaggcacttgccaccaagcctgacagcatgagtatgatctccnnnnnnnnnnnnnnnnnnnnnnnnnnnnnnnnnnnnnnnnnnnnnnnnnnnnnnnnnnnnnnnnnnnnnnnnnnnnnnnnnnnnnnnnnnnnnnnnnnnnnnnnnnnnnnnnnnnnnnnnnnnnnnnnnnnnnnnnnnnnnnnnnnnnnnnnnnnnnnnnnnnnnnnnnnnnnnnnnnnnnnnnnnnnnnnnnnnnnnnnnnnnnnnnnnnnnnnnnnnnnnnnnnnnnnnnnnnnnnnnnnnnnnnnnnnnnnnnnnnnnnnnnnnnnnnnnnnnnnnnnnnnnnnnnnnnnnnnnnnnnnnnnnnnnnnnnnnnnnnnnnnnnnnnnnnnnnnnnnnnnnnnnnnnnnnnnnnnnnnnnnnnnnnnnnnnnnnnnnnnnnnnnnnnnnnnnnnnnnnnnnnnnnnnnnnnnnnnnnnnnnnnnnnnnnnnnnnnnnnnnnnnnnnnnnnnnnnnnnnnnnnnnnnnnnnnnnnnnnnnnnnnnnnnnnnnnnnnnnnnnnnnnnnnnnnnnnnnnnnnnnnnnnnnnnnnnnnnnnnnnnnnnnnnnnnnnnnnnnnnnnnnnnnnnnnnnnnnnnnnnnnnnnnnnnnnacacacacacacacacacacacacacacgcacacatacacacacacgggtatcacagctaacctgtagggctactatctaacagcataaaatcaacccctgtaatggtacaaagcccactatgcaacccttcaggcagcaacaacactgtcctctgctctcagacaagcatatgggctgaaatcaccgtctcacagacctttcaagcagagatttctcaatgagacctgttgttgaggctccatccatcagggtgtgcctcgccttcagtgtcctggtttgtccctttgagcatctcccctctgcctagagatgctggattaaagttcgatactgtgctggtctgaataagaatgggccccatagcccgtttgagtgtttagttctcaggtagtggactgtttaggaaggattgtggagtgtggccctgttggaggaggtgtgtcacagggggtgggctttgaggtttcaaaagttcatgcccagtctcactctctgcctcctatgtgcttgtgggtcagatgtgagttctcagctattgccccagaaccatgcctgcctgctgccacgctccctggcatgatgaacatgcactaaccctctgaaactgtaatccagctcccaattaaatgctttcttttatgagttgcgttggtcatggtgtctcgccacagcaatagaacagtagacaaccttccctcatagacagagacacccggcctcctgcaggtccagaaatgtataattttagaaaccatccatacagactattgaaagtcaaggaaactgttcatcaaggaagaattcttcaagcttagctagtccagtaaattagccagatgctgaatttacttattctgcagtaacatcgagccaccatgtactggatattgaggctgcaacagacagcagcagttccaggccccaagaaccagtagcccagggctgtgtgaccagtggaaccatgaggtgtaaggcaggagacaggaaaaatgggtagggtgggtggtggcttcatacagaatgtaagtctggaactcagccagcccaataaggaatgggacaaggagcaaacagcggtccagagagacagaagagcccatgggaactggctggaacacagaagatgtcaaatgaggggaaatcattaactggacccagtcttggggctctttaagttttgtaggtaaaagccagaaggagttttagtgtggggatgatgtggagattctcccggatgttggaactaccgttctggaggtggttgcagcaggtggattcattcaagtgacatgaaaacccaggaggccagtattgaagggatatgatactctgaggaagaacaaatcaagcccggcccaaagcaaggtcgtgagacagagaagagggtgcgggtatgtgtggctgctgggatggggcctgtccccggcgggcacagagtaaagggttagtattgaagcaacacaactgaaggcagtgcctttaggagatggagatcattactaggagaccgctcagtcacttgggcgtgcccttcctggagattatgggaccccgatctcttcatcctttttctttctgcctcctggttcatttgatttatgactttgctctgcctcatgatggactcatttatgactcatgatggactgcctcagtagagacccaaagccatcagaccataggatcagggactagaaccttcagatccatgagcccaagcaaatcgtttatgagttcactctctcagcgacagaactatggtaactaagaaaggaggagtagagaggtccccaggtaaggaccaggtccactgaggccttgagtgatgaagacatacaggttcagtgtggagccaaatgggcacggggcacgcagtccatggaggcagacacaggcctgttgtaagggcaggatgactaagaggcagaaagaaaaaaaaaaacagagaagtatgagaaaacatgcagggtaggcctaggaacacagggtcaggcgctagaaacttgggaatagagccacagagaggcctccataagcactaactggtacccagagagggcccagcagaggtcttggaaacactgagtgaaggagcactgcgggcacgggggcaggggttaaagacatccaaggaatatcttaaaaatagggaagaaccaggcaaacggtggaggcacacacctttaatcccagcacttaggaggctgagacaggtggatctcagtgacttcaaggccagcctggtctacagggtgagttccaagacagtcagggctacacagagaaacccggtctcaaaaaaaaaaaagtggggggggtgagaaacacatctggtaaaatgctgacctgtgcaggcctggatggtggctgtagagggcttggcttgatccatccccggtacactatgtgtctgctagaggaacataaaagagaagggggcaggatctggggatgtctggaaaagacttggtatgtcgggaggcctggagatgtgtttgtggggtgaggcaccggggacacagggaaacatgtcgaatcaatgttcatggaggaaatcagtttcaacagaagggagaccacggctggagtcagggaagaaatgaatttaccagagagcacatggagaagggcatggaaggtgtgcacgatggtctgactgtttcaccgaaaaccacgttgaaatttcattgtgactgtgttgaatgagaggtgggacctttaagaggcaataaggtcatgggacaccaccttcattaaataattaaggctggttctaaacgtgtgctgtggagcctccctttcctctcccaaacacaagctctcatgcatggtatgtcctcgatcacgttgtgacacaataagaaagcccttgccaggtgcagcccttagattggggtcctgtgagccaattaaatttgtcttgtttctactacctgatgtgccatgttctgttacagcaacagaaaagaccaagacagcaggagagtaagtgctcctgatgacagccctctgtcacctcaacagtgagtgctcctgatgatggtctccatcatatcaacacaggacagtggggtgctcctgcatcttatcagtgagcctgatgtaaagacatgagggtgggagttcctggagctcagagaatgtgacaaaaacataagacagtataatgaaagttgaagaatcagacccaggccatgctaacaggctatgggacaatacgggtcagccaaggtcacactgtgcattcacctggacaacggacgctcttgggggtctaggatgagagcagaggggtgtgtgagtggactcccggcttggagggcttctacaacaaaggtaacagggcacatgcacagatgagccaagtggtagacacaagtttgaagggatccatgtcctcaagtgactgtgccctgagagaaagaggggaaatcacaaacaaaacagggaccatgacagcgtagaggtaagaggaccagggctgcctggaatggcaggcttaggtgtggtcaggaggccacagtcacatagatggcctctggcatgaggtcagcacagtactgctacaatacaggtcagtgagcatgtaaccatgactaggcccaaatccttggtggtccacagagggaaatgacagtgacagcaaaggacggagaagacaccagacagcaggttgatggaaaaattaagcgcttctcaccttctaggaaggaagaagtcagtagcagaaaataaagcgcagagccacatgaactcacagtggacagcacattgcagcggctgggggggggggcaggagggaagggaagccaggtatggtctcagggttggcacaggtagaaacacccacaacatggccacacagcttcacctgcctttgttcagagactggagagttagaagaaaactgcctcgatgcctccattacaccccaccttaggaggcctacaaacatcagagactgctggtgctccgccaggcagcactggcttgtttccagagcccctgagttctattccctcctctgtgcttgcatgattgatggagatacagtgatggcaagcctggctttgggggacggccagtcaacactcaacacaagcagaaacaagaaacaggcatcacacccgatgggggacccctctgggttcaccaatgctccccaccctcttaaaagaggaaacacagcacatcagacagacagagggagccctccaggttcaccacggcttcccccacctcctacacacacacacacacacacacacacacacacacacacacctcacacacacacacactctctctctctcttctctctctctctctctctcacacacacacacaccacaccacatactctctctctctctctctctctctcacacacacacacaccacatacactctctctcttctctctctctctctctctctctctctctctctctctctctctttcacacacacacacacacacacacacacacccttgcaagagggctccacactaatgtcaagggccctgaccttctggaatgtttggtcctctttgcatcagttgtagttctccaggtcccaaagcaccaaggtccagaaaaaaatacatgtccctcgctacctagggtgtggtcccaaaggacagccagagatgggccaggcacaagggccagagaatctgcccttataaagctggttaagctcctccatgcccccagggtcatcctcagtggtgaagaaaaaggatgggcagtaaaggcccttctcttcctgtgtggatggagagagaacatggggtggcagaggacagagtggacaggcagcagctgcaggtggctgatcctggatgctacaggatggcttgatccaaacagaccagcagtggaggcccaagaagggctggcaggggctcatgctgtccctgactcagagcaggtcaaaagggtctctgagaaaaggttatagtgacccaagaatcctgttttgtaaagcgcttacccctttcttttcatagatggaaaactggagaaagtgtccctaatggctcagtccgtggcaggctagaactggctgaaaggttcatccatgaagacactgcctagtaaaacttcccctcagcagactggtactcattatcccctgtgaggtccattcagactccaaaagtgaatgtcaccatgcccaaagcaatttcaagatggggtgatacagcaaacctttccagagagcatcaccaggaactaattatatttgttaattgccaaagttcagagggactctagatattaaaaatcctggaaaactaaaagcttgaaataagcggtaacacgtctttgatcttttcaaagaacagcttcatctgtgtttatataatgagaccgtctgcaaacaggctcggccaagctggagcagagacgatactgaactgtgagtaaacactgttcgcctcagactggctggaaacagacatcactgcacacagcaaacctttcaggacacttgtgggccttttcccttctgaacatcaacattccggttttttaaatgcacacacacacacacacacacacacacacacacacgaaagccacccagtcttttctggatggagagctgggtggtgacttttgtttcgctgtattttcaaacttttgtgaaatgaacctatacccttttgcttttataagtaaaagtcaactttttaagaagatggaatagaatttcttcttttaaagaggaatatacatagcgaggtgtagtagtaaatgcctgtaatcctagcactctggaggcagaggcaggatgagcatgagctccaggccagcctggactatatatcaatacttccaccaaaaaacaaaatgaaacaaagcaaacagaaaggtgggagggggatgggcctcgttacactctaatcagaaatcccaactctaaatgtctttctgacatagaacatactgttggggtaaaaactattattaaatcaataattcaaagccagtgattacagctggggaaagggcttggccataagagtctcacagaaccagcatatactagctgcccaagtttagacaaattttagaacctctctgcgccatagtttcttcctgtgtaaaaaaaaaaaaaaaaaaatcatctgtggggactaaaggatgccctgtcgtgtaaaagacaatatccatgaagaacacaaatccatggtttcaaacaaacaaacaaaagaactcaatctcactctgtttctgcaaagcttgacaaatgcactcaaatgcagtggctgatgggaaataatttcatgtgaaaacagtgcagatagattttcaaggcaaaatcaatatttaaatgtgcttatgactagccacatccatctctgcttctagacatggggggggggtaactggaggtacacctgagaggtcttctccaaactacaaaggatggatgcatacatgctgtaaagacagtaacttcagttattaagcaggtatatacatatacagataaatagagggaaaaaacatgccaagggcatctctttcaggccagggggtgcaggcattttaaccactgtgtattaaatacggattccttgcttggaatgtcaatatatactaagcaatcaatatgactcatcagatcaggaaatgtatagaaatataagatgccggaaagacggcaaatgaaccatctactaactctcctaaattttgggttgatataattaccaccattcaacaacatccacaaacacacagtgtgtgtactgggaaatcagaccatttctgagttcagctttcagtgttcaggaatcaaatcactgtggtggggattggattgcttgattcagagagagaaggaaaggactgggaaacagggactgcgccagttgtcactgtgtcacttccactaactgtgccaacaggacctgatgtgggctttgactgtgttgactgggagatgagggttgggagccaggccagtgcagaaccactaggacacgcaactgtcattcagttgtctcttggtcagcttagctgcaccaaccatccacttaattagcttgttcttgaattatttatttccctccccaaccccacccacgcacaccctgagggagagaagagaattcttgctggtgacccaccctgctgcaaaaccagtgcatcaagtatgaaggagtttgggtgctctcgggatctggcaccttctaggcaaagcaaaatcaggaaaacccagcaaattaagtattagccttcaaaaatgtggctccctctccgaatccaaagaagcctggaaagttcctttagaatacgggagcatatgtctgctgcatatttgggcatcgtctaccctgaatctctttccaacctaagtctggaacagtttcatttttttctcagcaattgccaacagcctcaaatcccactgtctgccgtaggttagactcaccattgcagggcagagaggacaaatcccaccacatctaaccagcaggactttttatatcagcccccaaattctacatcggatctcctctctcctatgtctacattcctaaaccgactgataagtgattccacacgcttagaaagaggtggacgtcccttggatgtgattttcagggtctggtggttagaagcccctcccacctccccagacgctctccctctgctctttgtcacagcccttctagcaggatatggaggcttctattttaagacaaaccctctcacactagaaaccactcagacaaaacaccagcatctcaactacttcccattcttcctccttctgggtcatctcctgtagtataccagctctccaaggcaccccagagcctccgggagctggtctcagagtccctccatcaccccaccctgctggaagggcaaggctgtcaaaagtgggtatcaggtactgggaccgtggtccttctgaccatctttctcggagtgagagtggggaccttagccagcctcagaaggaacctaagggatcaagggtttgtgaaatgtgacacagtccacctgctcctcttgctcctgcttcttcctccttatccctctccgggagttctcggctctacaccacaccacatcacacttggtgacccaggacccatccgctctccatcctgggaggaagcttgtactctagggtttatgggacctgatcagatctataccacctggagaccttattcctccctctctttttcattcccatgtctcttatctccctcccctcctgcctggcctctccctgcttcctcttacaaggcgctctggtggcgtttccactttgtctccaattatgtctaaacgcaacccaccacagatgctgacattttaaatgtttagttgttatagttacttgactaattgcctgggccaccggcagctcatcttctctcctgcggggggacgggtggggggagcgtgcagatgggtttggagccactactcgctagctggcccgggacaccttgccacgcccaggagagtgcctcggcgggccacaggctccagctggggcaagaaggtgtgccctgtaccgcctggcctcgggatgccaagaactgtgtctcgtggcccgggacaaggaagatggacaaggtctgtccagaaaatgcttctatctggcctcacagtccacccacgcctgcagtaaaatggggagacgaggtgggcatgggggtgtgggggcaagtgagagttagaagccggctgcaggttactcacgtgccagatagcgaagaagatgagcgcagcacagagcaccagggacagcatgtagcagaaagcagcgaaagtgaaggccatggttgaggaccccgaccccaccacacacaaagctgctccctggagatcagtgccctcccaaacgagggccagaaagacgtctggtctacacgctccggcaaaaccaacagcacgcacaagcagaggaagagttgagggtcagtgaagccggcaagattcgggcaggacaggagagacccaggatgtggagcgcccacaggcacagaatgtctctggcggcaactgtttccctagctgaagaagaaatctaaccagtacagaatacctgcagacctgtgccaactagagacgctcttgtggccaacaggcatcgggtgctaggactccacagaggaccgggcgacgaggaggtcccgttccctggaaagagccctctctttcctctctggagcccaagaggtgaggcgagcgcgccacaccgactccaggagcgtccggccaggtgcccgggctccgaggtccccaatcgcacaagtctttaggaggcggccgcccgcggcgagccaggacccgttagccctgcaccctgagctggggtcttccaacgcagctgtgcgcaccgagatgcatccggccccggccccaaccgcgtcccccggccgccggcttccgtaacccggtgcctgggaaactgggttggaccggggcggcgtgggctccagcctagcgggccagctccgggccgggcggctgcggcgcgggtttccggccaagtgctgctcgcggctgagcggggctccacctgctgctgctgtcgccggggccgcgaagactgcggcgctgggacccctccctcgaggcgccccaccctcgccggctcccgagagcgccctccccgcgggcggagactgcggcgatgggggccgggaggcgctggcggggagacgcggtgcgtgcccgcctctcggaggaaacttgcggccccgcgcgcggaggcgggaggggcagggactctttaagcacgtgcgcccggagcgagtgggaaggcggaaggctatggcgatgacgcgtccgccgcccctaggcttccagcagtttcgtgcacaccagagcggaaagtgaagggacttggtcgcgggagtgggctgggtcctgcttaggcagatttcccagactgtaaaggattcctgatctgggaatgtcttttcgagtctaccctgtgcccatcccagcacccctccctccccagcaccccccctcccccgcagcgcagaatcctgcattagagctcacccctggcatcctgcaagatcctgttccatccgacactggggttgagggaacctggcgccataagtaaggcagcaccaagtgtttctgtgatgctcagtggcattgtttagagcacctactggttaatgcagactctttcctacctccaactttcttagcatcaaataaacctgcttttcttatcagaaaagtagcaaggagtatcttcaaaccaaacgggacctagcagggagcactaggtgcccagtcaatccgtcaatggtagagactgttgtcttcacactcctgccacagtgttttagcatctcagaattttgtatcataatcacgcaaaaaaagactatactcatgtctatactcatgtccaccaatcctgcaggtggaccttgggtttcagatgagtcagtctagaaagcaagaagaaatgtcctgaaagatgactagcaagacacttgggagtctagatacgcaccacggtttggggtgaatgtcagaggatcgagtatgtccggaagacagtgtttcactcccattgaccaacctctggctcttatagggtgttgtcccctcttctgccgcctctccacgatggtccctgagtctcggggagaaggggtgtgacatagctgtcccatttgtggctggttgagcattccactgcacattgacaggctgtgtgtttctgcattaactgtcctccactgcacaaagaaacttttctcaggagatctgagaactgcactaattagatacaaagttaaaggacaatttgatactacttccatttagcaaaataattgtaataagttgtcctctgggccttaacaattccccaaccatggatgagtgggcatgagtttccgcctgtgaccggccttaaaccaatcagaaagcacctggtctccctcgtctcccccctcccccccataacactcatgccaccaccgttgctcccaggggcatctcaccgcatcagtcattattgtagctcattgggttcacagccggataagactgtggatgagtgacacacccacagacacctgcatagcaacttctggcactatgaaaggcagacagcaggaaggacgcttcctagtcagtgccaacttgatttctccatgtcctgtgaccaaagtttcttcagcaacagagtcttatcatcaagatctataagtaaccaagcacaaatgacaataccctacactatttgggattctctgggatatccctaaattctacaggccctccacgttagacacacaaatctaaagatgctaggacccactgtgagtgagaacctgcagtgtttgtctttctgggtctggaaaccccttactttaaacaatatacaccaaagaaaaagcattcccaggtgtttctgaaaacttggctgcaatgacagactttctttttagtagacatgagtatagtctgcagaagggatgcccatgacctgtttcccattgatgccatttttctgaagtatgaacaataaagtttagtctattgcctaaggtgttattctcaactgcacaagatcaaaagggtttaaatttctcattttgaataaattattaaaatgctgtatgtgatagtttcctagaaagtaaatattttactgtcttgatttaaacttgtcaaataagttgctttcttacataagtaggtgtgttttccatccggcaagtagaaccgtgaatttagaatggatgtatgcttatatagacaccattattttttaatgactattgaatacttcatgttttaaaatgcttgattatacttaagtacatgttgggcagttttaacatttgaagtattatttcctagacttctagattgttttcatcaacatcttgctttaattcagaagatttttttcaaatgtattattgtataaaatttttcttctgatttttaatctaccttttgactgataattataatgtaagaaattaaaccctaagctttgatataatgtgactgacatgctgatgaatgtgtgtgtgagttataaagattataacttttcaacccttgtagattcttagtttgcaagagacccttatgacaaaagagagattcacaagcaaaaacaactagaaattttactaacatgcatatttcatatacctgtgggagaatcacaaagaatgacgagttctcaaagaggtggctttgaaattccagcttatataacatcttcaaatgacaatacattccttgagaagtgactaggcgaaggaaaaggactttgagtatccaagtgtggccacttgggggaaagcaaaaaacaggcagagtgaggaaaatcaagcttgttcgggtagatgggccgatgaggtccagagatgtaatgtgtggcgaatctgttctccatggaaggagaatgtgaacctgttcacattggttggaggggagtcttctgactttctgagtgtgtcctgtctttaggcaggtagagggaggacagagctgtcctgtacacacactatcttcactgccttcaactcagcaatcttttctgtttggggtgacatattcgggtctcccacacagccttttaagaattaattcccagtgtcatacatttttgtcagtagcaatggtgggaaaacgatgtttttgttaaaatcataaaattgttttgtattgaagacatgaaaaagcgcgttattcctgtctctcagtgagaagggcattcaaggcgtgtggcagaccttcccggatgcagctagttaaaaacatccctgtgtcctccatagatgcagatggctgaggtgtatggctgttaatagattactgacaggtctgtccacagtgggttgtctctctatcctgagatagtttttaatattttattgacaaattcttaagcttgtaaatattggaacactgtgtttacaatatatgcaagaattgcaatgtgcaaacaatatatctaaagtagcaattattagaatcaagggacaatcatgatttcaatatagtgacaaacctgagaggcacacagcggggggggggggggggctttgtcataaataagtacatggggggcccatctatcaacggcccttgtgacttcctgtcatagttagcctgaataaatgggtttaatttagaatttaattattaattgattttttctacaatgttctacaaggaccaacatactgttcaccaatcagaacagagatctttcaatagtgtaagagttgaggcagttacactaatgagtgctggctggatagagtataggtgaaagcagaatgactttagagacagcagcttttcccaccttgggaaaaggtttctctctcagaagatatctgggggatgggaggagagaaagaatgcttctgccaacatctgggggaagcaagaagcaactttctgcagactggataggctaagaccaatggtttagagaaaagaggacacacattacatcactccagtgttgtagaagacacacctgtggctgtgtgatgccaaggaggcagaggtcaggcctaagcctccaaggatctccagctagcaaagagaagaaggccaggaggaaagggaccgagacacgggaagacccagtgtgggcctgtgcccagtggcagaggtagtagcttctggtcctttgtgttatacatccccccaaaaaatcttcgccaaacattgtgaggatccttctgtatccctaataaaaaaaaaaacttccttctagcccagcatcaaggaggctcagagttagatttaaactattttaaaggaagtcaggaggttatgtgtgcagttcatgtgaacctgcactttctagactttccacctatgaatgggggctgggcaggttaaagaaacagtatcggaacccagccagcaccagcctggcagaggagggcaagccgagcgactaggattatagtggactaaaggcaccggctctgaatggaggtggcaggggttgctcccaactttagaaaagttattattgaaccaactatatgcaagaaaagaggtaaagcatcaagggatgagggaaaactttcagatcctagtgtttagagagcagctataaagggtgatttagggacaactcgaaagcactcacggcaagatgttacctgccgatgagtctgatgggggacagagaaatgtctgcaaaactctttgctgctgccttgcatcgcttgcattgttatgaatggtcactttaaaaggctcagttaagacactccaaacatcaggagagggagacagtcttccggaaagtgccttgcctagacggagtctacggttggttggaaagttgctgagaaccaggagtggtgggtgtggaggatgcagtgtgtgggtttaacctgaaggctagagggttgctggcaatcccacacggcttggcagggaagcagtggaagaactgaacgaacgtatccatctgcaccaaaaagcctgagctaatgtcagttaggggacatgtctggtcaggctgtccaatgcatggagtgcggttactaacaggatggaaggagacttacacccccactgaactaagctgcccatgaattcagcatactaccctttatgcactgcgcatttccctaatgcctgtgagcatggggtggaggcaggcgtgaaccagaggcagaaaggagacgggggggggggggggaggggaggcgggggaggatgagcatgataatgggtcacatcttagctgtgtggagacagccaacaccttcaccttgttctgtcatcatcttcagtgatgcaggaagttactgcacacatggaaaaaaaaaaaaaaagcaggagccaggcgtggggacatgcacctctgatcctaacatttgaggatggagacagaaattccagacgatctgggctacaaaatgacaccttgtctcaaatcaaaatgacagaacaactgagaaggagcaggacagtgtgcagctgcctgcagaggaaggattagaagtaacttacctaatgttgccggcttgactctgatgcttccctgagcacctgcccccagcatcctctgctttgttttacatcactgttagttagctggatcagggcacgtggacaacagaaagccagacctcagtggcatagcagaaatgtggacggccaaacaaaagccactcaaaatccctttgcttttctttcctatcttgtaagggccagaatggggaaactgatcttctcagactgcttgatgaggtagctagaggtagccacaggtcagagttccatccagcgaggtagaggagacccttgaggaaggctccatttacttctgcacgaaaatacgccatcagaagatgcaaacttttggctcttttctgtcttcacacctgctatgtggagatgttggctggagacgccacaacctttttgtgatcatgaaaatcaaatcacatgctaaggatggagaatcagaagggaaaggggtctaagacactaactaaggatgtcagggagctgccacattaggtctaaggtgatgattctgattttatgtcgtatcgtgaacttttcctgctaagccatgccatcagtgaggaactgtgttcaccctcagcagcagaatattttatttctgtgggttcataaaagaagaagttttggctttggagatggatcagtccatagagtacttactgtgtatccatgaggccctgtgttgtgcttccccagaacccgtgtaaaagctgggtgcggtggcacaagcttggaatccagtgctagggaggtggagaaaggtggatcactagggcttgttagctgcccagtgtatcctaattgatgagccccaagtcccagagagagatgatgtctcaaaaacaagatagtcagcctctgaaaaccgacacccaacattgacctctgaaaaccacacccaacattgacctctggccaccacacacacacatgcacctgtggtgacactttgtttatgatctaacaaatacagcttgcctaaagatcagagtgcaaagttagccacactagtgagccatagaggccaggcatacacttttaattccagcactcgggagacagaggcagatggatctcccttagtacaaggccaccctgagctacacaaaattgatccagtctaaaagagaaacagagctcacacaaagatgatcccagcacttggggtgatgtgatatgcctttaatcccagcatagataggaatagaaggccggaggagacagaagctcagtactgtctaaggtttggtggagacaaatgcagtctgaggacaggatcgcccctttggtctgagcattgatagaggagagaactctctagtgactgactgctttgcttctctcatcttctgctgtaaccctaatatctgtctctaggtttttattattaataacaattagaatttgtgctacacgcaccagcatgcacaagaacaccaacacacacaagcccactcatgtacacacacacacacacacacacacacacacacacacacaccacacacaccacacacacacacacacacacaccacacacacacaacacacacacacacacacacacacaccacacacacacacacaccacacacacacacacacacacacacacacacacacacacacatacacacacaggagagagagggggagagagagagagagaagaaagtaagaagttcccataataatgggagacattttaggtttaaagagaaatcaggcactagggaaatgtctggagatctacaaagatgacaccaactaacaatctaagcaacagaggagagactaccttaaatgccctcccctgataatgagattgatgactgacttatatgccacccgatagccctcatccagtagctggtggaagtagaagcagacacccacaactaatcactgaactgaactggaatccagatgcagagaagaatgagtgatgggcaaaggggtccagaccaagctggtgaaacccacagaaacagctgacctgaacatcggggaactcttggtcccagattgatggctaagataacagcatgggactgatccagaccccaggaacatgggtttcagtgaggaaacctcagaaatctatgggaccttctgtagtagttcagtatttatccctagcacaggtgtggactttgggagcctattccacatataggaatactccctgagccaagacacacagggaggggtgggcctaggccctatcccaaaagatataataaattctgatgacaccctatggaaggcctcaccctccctggggagcagaaaggattgtgataggtagggttttagtggggggtgggtggtggtaggggaggacaggaggtagtgggaactggaattaacatgtaaaacaatcttgtttctaattcaaaaaaaaaaaagaaaaagaaaaaaagaagttccattgtcttattccacaagaattcataggataagtagttaagaatgaacagggcagatcattcatgtggtcagtgttcatgggtcccaaactcagttttcccattctgaatttatatttatttatttatttcattacactgatgtatctgtgtgtgcgcgcatgcacatgagagagcacaagcacgtgcatgtgccacggtatgtatgttagggtcacagagctatttgtgggagtcatttctcctcttccactacgcgaggcctagggatcggcctcaggtcgtcaggctgcacagcaagggcccttccttgctgagccgtctctcttgcctgtgaatgtgtttctccttctaggcatcattattacaggatatttctgaagacgtgtcattgtgattggtttaataaaaagctgagcagccaatagctaggcaggagaggttaggtgggacttctgggcagagagagaaactgaggggatgaatctaggtatgcagattttgccagcaaaacatgcagggagtcagacacacagagtgagaagaggtaaagagccatgtggcagaacatagatcactagaaacaggttgatctaagttctaagagctagttgaaaacaagcctaagctaaggccaagctttcataattaataagacctctccacattgttatttgggggatggagatccaaagaaagtccaacaaacaagtggtactaaacatcatgcctgccttccagacaggaataagtttgaattaaagttccaccgtgggacatggctagtcttgacagagcagtggcaagggagaaagtcaccatttcaccattattgaaagggaaagcaagacattttggtcactactcactcccaaccgcctccccatgcttccccaccatgccacacggttctctctttcatctctttttgtgtgtggggggggggaaatggggggatgctcacttaccacttagcctggaaattgtgtagactctggacagggcctaactagcatgtatggataataaacactttttaaattttaataatcaggaaatgcctggggttctagcctcctgcatttctatagtttcctttattgacatcattctgtcattggtaaaacaggcaaagcagggccaggcaaaggacaaagaaaactaagggaatgttacagatggaggtttgaaagtgagaggtagaaagatggggccatgttatcatttaacatgtgatgtagagtgccccagttctgtaatggtcagttgggtagttcaaaccaagcccctgataaaacacaacttggaacatttgggagaaacatgaaaacatctgggaagtattaaagctctaagaagaatggaaggcctttctgaggtcagatcccaagtgactgggaagccagaaaagcggggctggcactcgaggaatttgctgctctgcggaagtggctgggggggggcgcgtgggggggggctgtgctccactgtcagtcagtgccttctgtggttgagggcaaaattccaaaccccagagcaccaggcttaatgctcaggaagccccttctttggcatgggcttggcaagactgctccagatgagtcatggtgagccagaaataagtcagctgttagaccaatgccatctggtcaaccagaaatccactgctgcagtgtgagagggaagtatcccccataggctcatggtttggactcttggtcttcaattcactgtgttgtttttggagactgtagaacccttgaggagtgggccctagttggaggaagtggatcactataatttatagatatggatataaatttaaaccattactctatatcatatcagtatatttatatgtacatgcaatcatccgtgagcatatcttgttcgttactgtagctcccagggttcacagctggataggaccccctcccccccccccccccccgttgcctgcatagcacttttgtcctataaaagctagccaggaagcagggcgctctctggtcaggaccaatttgatttctccatgccccgtgaccaaattgtgtggtgtcttgagcaataaggtcttacccctatgttctggagggcaatcaagaccaacaacaattacctgcattgttaggaggtcttcaggagagcccgaccccaagaaaaaaaaaatcaaggggagatatcccacatttggcactgggctttttatttagcaaactgcggcatctggaaggagtattatcccctgtgcaaggtaacgccaaataaactattttatataaatagaggtaaggcttataaatagaaggtaaacatatgatgtttcaaacacgcttagtattagttatcttccttcaccctgctaccctttcctccccgtcactcttccttcttaaccctcccctcccccacttactcccccccatgtcacctgtgttctattatcccctcccctcgaggtctttcttccccctccctaccaaccatctctttctagtttcctagagtctacgtttacttcacattaaatgcacaaacccaaagattagacgccaggacccacatatatgagtgggaacatgcaatacttgtccttctgggtttgggttaccttactccatgttctaattttctttctgttgctatgatataaacaccatgaccaaaaacaactttgggaggaaggggtttattttctctaacacttcccagtcacaatccattattgagggaagttggagcaggaacataagcaggaaccatggaagaaggctgctcacactggcttgctctctggctcatggtcatctattgtacacagcccagactcaactatcttgcattggtgtcacccacagtggcggggacggggccctcccacatcaatcatcaatcaatcccacattaatcatcaatcaagacaagctcccaaagacatgaccacaggccagtcaggaatcaacccatccaaagccccatgtatcattcagactaacctgtcctaaaatgtctctgctgccctgccttgcttttcccctgcaaactccaataaatgcagactcccctgcctcccaccccttcgggccccttgtcttggtgtcttgccctgtggccctttgtgacaggcctcctgtgtctaaagcccagcagtatgatagctcatttctcaaacctactgctgtgtagctgaccctgaactgtgaggagtcaccttcactgtgaacttgattggatttggaatcacctaggaaacactcgtgtatgcacgcgcgcgcgcgcgcgcgcgcgtgtgtgtgtgtgtgtgtgtgtgtgtgtgtgtgtgtgtgtgtgtgtgcacgtgcatttccagggagggttaactggggtggaaacaaccaccctcaatatagacagcaccacctgactgaataaaaaggggaaggcgaggaaagaaagtcccttcattgctccacgccctgcagatgtgccccagctttttaccttctcaacttgtaaaacttcatctccgatcccactgaactactcctgctataatttggatccaaaatgtcccccgaaggccattgctaaagatttgattgtcagcctgtggcactgttcctacaggtggcagatatgagccagcttgggctgtacagtcaggatgccaggatgctgcaaaagaggaaggtacagtattgccaagaaactatggaatggagtatggggggagaggggggacagcctcagccacagaactgatgatttccgggtcctctagcctaagaggcaggcaataggactgacattgcctgctcatgtgaacatcaacttcctgtgaacattgcctttgaggaagctaggtggttttcctgtgacagcacactcaacggaccctccacacagatagcaaaggtatttgtctaaggcaccctatctagttctgaaccctggatccctccatacctggcaatgtatattttttttaacactgcctaagaggcaaccattatgccacttagaaatggtggcacttgagcagaggaacttaatggctcatgctagtgatgggaggccccaccctcccaacttcatgcctgacacctagattcctggtgcagccctttgtcatctaaagcacagggagtcagcagccgtgttgggcgtgattattagcatgataattcctcgtcttttgctaattgcaagaagcttggagtcctgaactttccatgggatgtaaagtgccttcctactcttcccagaggagagcagatgtgacctccttcacttttctagagtgtcctctagaaaacctgaggcacttactgggtaactactcagctaatgagtctggggctcaccagagccatgctgaatctagtcttaagcaatgcaaatgttactgccatgacttccctttttgctccccaattgcatgttgaccccagtgtgtcctcactgagttctgccctcttggtcccccactccccaagcgctgcagaatcttagcttttcacaccatcccactatccccaaacaagcaaagcatgcctgcaaccgtcatagaggtcagagaaggtgcacatatacacagacatgtgcgtctgtaggaatgagtgtcacaaggaaagcagagtgctggggtctcctctaagagaacggagggtgtctctccagaccattacagctcacatagctgtgtgtccatgaaagtgatttataaatagctgctattaatagtcaatgcaacagctttcttgggctccagatgttgtggcatttgctctgcatcgtctccacagatgctcataatgcattgtgcctactgacaaccacattttaccagagaggctaggcacagcaccatcaagtcagagagaagaaagaagtgcatgtcgcctagtgttgccacaaactgaaaactgcaaaaaacctgactaattactgaggatgggctgtcagacacctctgcatcagattcctgggtgtctggatggtcatttacatatgaattaatttactctgtgggtggttttgctttgttttgttttgtttgtttgttttggtcttaaagagaagcaaagattatagcagaagttacattgtttcctgagcctgctctccttagcacaggctcaggagaatctaccatggagctagaatacttgaactcagaaagatttcactggggaatttgcatcaggctcttcactggggccacggccacttcctggctcccacagtgaacctgcctttttcctacagcctcacagtctgagacaaacccccccccaaaaaaaaaaaaaatccaggtactctatagaacttgaaataaagatacccaaggaagaaaacaaaaggtctcctgtagttcttttcctaggcgtgggatcccaagaaatctcccggttcacattaacacatattggtctcgccattgttccaatcttcagccatttctaagaaagacttcctggcccttccaatctctccatcccctcttctgcagtgttcccggagccgtgttcatgtggaaggaggaaaattgcacgaggtcccacctgtagacaaagctctacaggcaacttttgactgccaggagaagaaaacttagccccttctggagattaatcctcttacatgttgtccaataccgagtggtcagccctgagaccatatacataaacaacaaaaatggacttagcagatatatatatatatatatatatatatatatatatatatataacaaatataatcaaagcaaaagagcctagagttggggaggcattcaagggagagtaactggggggagctggagggaggaaagagggaagtgatataattctatttcagataaaaacattttttaatttatttatttttatttcctgtgcattaatgttttgtctacatgtatttctgtgtgaaggtgccagatcccctgaaaaatgagttacaggcagttgtgagctgccatgtaggtgctgggaattgaacctgggtcctctggaagagcagcctgtgctcccaaccactgagccacctctccagccctgttaaaaaaacatttttacaaaaagaaaaacaaaaagaatattagttaaacatttgaggcttttcattctcctggacaatactcatggagggagaccacagactggatcaggatcagccaatcttgtcttggggacaccgatatccaggatgtgctcaaggcggatagtgtcatccctacctacaggaagccccagctgagcataggagacattggggagacacacagaatatggcaaatattcagggatgccatgacatttatatatgacaactaaaacaggcaaaaactatgtttttctttaactgttcttatcttgaaaacacacacacaaagcttagttttattttataaaaaagactctactagactagaccctttttatgtaaatctcttattttctcattttttccagacctgatttttctttcagagccatttctttcttcagagccattgtggccacaccccttccttctcaagacggtgcctccgtcaggggccttcctatgctgatggtactaagtgcgaaccttaggagccacactctgtctttctgagattctcctggtcacctctgcacactggtgtgtactgctccccctagatctgtgatgctgtgttagcccttagggctgaagacctgggcctctagccttccttcatagcttttccttcatagcttttcccggttgcatccagtcccagaagctactctagcacccatcccttcaacatgtgcgttgctggaagggctgagtaacttccacacccagtggcaggcctggaccacccaaagcatggcctcagctcccacacatttcccatgccagtgctgctaaacacagcaccacgcaagagatagatctgcccagtttagtaggggcacgctttcgctagagactggagtggtggtccttccaggtttgttctcaaagcttgtagctccctcagcagcaccgagccaatctctgccaccatctgtgtatggtccctttccagtgtctctgtatctcctcttttcaaatgaattcacgagtcattgtgtttaggtctactcaaaaaccagggtgactgcatctcaagatccttaaccagttgtgttacgtgttcccaagtaagatcacattcagagcaccaggtgaaagagtgctgagagtccggcacacactctctgtcacttgctccccagggaagccgggagtacactctagttttcagcatccccagcatctcattgcttctaggccctgtggaggcttcagatgtcactgaaaagatgatcattcccatgaaaatgtcccttcctgcctcttttctcccccagctctgggagaaggtggcttccctttctcctgcgtcatactcggagttacctcttctacacacagtgaaaagtctatacactgcacagacccagctttgctcttgtctttgtctttcaatgaactgactttcaagactaagataccctggttttttaaaatctaatcagtttgagtgacacctctgtcccaggctactcccaccttccctatgcagctgtgcagagcaacccagaaatgggggcttcagagtgaaggaatgggttgtggttaacactgccagtaacactcttctacatgggctatggcggtgcatgtgtgacccctaaggcactgtgtcctgtctgtcttgagtcacggcatcaacacagcataaagcagatactcattacataagtgttgaatggctgggggtctgacaaccttcatgagaaatccttgaaaaagaaatgctgtggaatcattcttttgtacactgtaaagacgtgttacttgaaccggtttaataaaaaggtgaccggccagtagccaggcaggaagtagaggctgaacaacccaactaaggacactgggaaggacggtaagtccccagcagacacagagagagaagcaagatggacatgctgtgctgagaaaaggtaccaagccacatggcaaagcacagataaaaatatgggttcggggctggagagatggctcagaggttaagagcactgactgctcttctagaggtcctgagttcaattcccagcacccacatggttgctcacaaccatctgtaataagatctggtgccctcttctggtgtgcagatattaatggaagcagaatgttgtatacataaaatatatattaatattatcaatattaattaataattaattaatatatatttaatatattaatatatattaaatccatatatatatatatgggtttgagttagctgataacaaacttgagctattggccaagcatttataattaatattaagcctctgtgtcggttatttgggaactggtggatgggaaagaaaagtctgcctacaaataaatatctggggttttgataaatgggcatgatggtttgaatgagaatgcatttgcatgtttagtccgcagttgatgaactgtttgaaagaattaggagctgtatccttgctgctagatgccacacttcctaccatgacgatgacggtctaaccctctgaaactgtaagcaagcccccaattaaatgttttcttttacaagtgttgccctggtcatggtgtctcttcacagcaatagaacagtaaccaagagaagtgggcagaacaagcgtaatttaaagtggggaagtgtgacaaaatgcctgtaaccccagcattggaagcctgaggttatcaagtttgaggccatctggagctattaataggaaagcagggacggggaaagagatgcccatttcaagatcactaaggagttaagtgactggcaacagggggatcagtagctgagcgatccctacgagtgcgagagaccctccacagaggttctcagtggaagagaaatggaacattgtgattcagactaaaacggaacatgcttcaagagcgcgtcacataaattcatgctttattgatctgttaccacagaggagacagcatgtcgggggctcatacctgccctctggaggttagtggcagacttcgctgtaccagataaggaatccccatttctccctgagacaagggggatcccacctctccctagggccctgagcagataagcatcattagcacactgttaaaatcaccccagggataatgataagttctttaagttcttatcataaatatgcctgtgttgttcctttgcccataaataaactaaaacattgaaggttggagcattttgacccttatggtctgtaggattctcccttggtgctctggctgccttgaacaaaaggattgtcagtcagtgagccaactggattatccctatgccagcaccaaccattctgaacactctgtgagtgtcttaaggaagctacacaacaattacagctgcttgctctagcagctgtagatgtaaccctagccaagactgacagtttctaccagaccttttttttttttttttttttttttcacaagctctagttgaccatgcaaccatttccacccaggccagagggggaaggagtacttctgatagggggacagctgtgactggtgcaaaagggacaataggagtatgatttgcagaaacacaaactttcctttgtgcaaatgttttctacgattggtccaaatacccccttctctggctatataggcaggctattcagactgggcagcacccatgggtggcattccttcccattgcaataatgggcctaggcgatggtttctctgatgagtggtcttttaacagcagttgtgaatgagagttacagcaccagaggaccacacatgataaaatcagcaggaacagcggcatgacagtaataccagagcagtcatcatgcctgtggcagtggagcagccagccccctgcttgacatctgaagaagaggaagcactaagtggacagcaagccacgttgcaaaggtggcagaacagccggcttcgttggcagctgtaaaagagagagagccacaagaccagatgccatggcagacactgcagcaacaaaggattgctggcagcagcttcccaaatggcagcaaccaagagaatggccgtagcaacaagagtcaacggggcaatcagagagtgccagggcagaaacaaggactgcagaagcagacagaggctggagaactgaggctttaagaggataggaagctgtaaggagccagagaagagaaactacataccctaatcaccgggagaatcctaaagaactgtcagatctctgggatcaggggtcatagacaccccacgcacaagagctgtaacactggcagacatcaagtgcccacctggaagttggaacaccaggctctgctgagtgagagctgaggaatcccagctttctaggcctggccctatgcagtaacatttggagagttcagggtcccactaccctagtccagcctgagagccctaacactagagggcgccacttgctgctgctcttgcctgccggctgccactgttctcccttgtcaaacgccaaagacttccaaagccaggcccttggagagcttgtctgttgattcttagcctggtggagaataaggacaccagccatctgactgacaacattcccattcctaaacacacctgttaggaacataacttaaaaatcattttgtgtaactcaaagggcattttatgtgacttgaaataaccaccaggtaaggtagctctgataagagctgagcctcaggagcaagccccgggcaggtcacctggcagctcagacaggagcctagccaggacaggctctgatatgctaatgagctaaccccaaggccaagttgatcagtgagccagcaccaagctgtgggccctgataggcaaagctaccgcccagtgaaacgatataaaaattgaaactctgggaatggtctctgggttcatgctgccatgctcctgagacacgacttctctggcctctgtgttgacacctatctacaagaggaattgaggctgtgtgtgtggctccgaattcagtgacccctgaacttccggcactgtcactgagcccacacagggcccacctgacagcgtgagccaggctgttggtctagctctcaagggcccccgggacctgatcaaaaccatcctcccagcctatcacagctaaagaacatcaaggtggatgtgggttgagcctgaaaacttccaaagtcctcactggagaacaaacaagtgttccccacttggctgtttaaactgtatattaacatcacataggagtgtttgtgtgaataaaccaaacatattccaaagacaagtcttgtgtgggcatcctaattgccacacaccttacagcccataggccatgttctctgtgatattccttgaccctagcttcataggacctgtgcagaaataaagctacatggcatttctgagacctccatggtcttacactaagtggggaaaatgtcacagagttaattatgcttgggggggggttgaataagaacggcacccataggcttgcatatttgaatgcttggtccccagctggtagaactgtttgggcaagattgggaggcatggccttgttgaagatgtgtcactggggggtgggctttgaggtttcaaaagcccaaactattaccagtccattgtcattttccatccctccctcccccagcccgccttgtgtttgtggatcagatgtaatctagctccatgcctgctgctatgctccccgtgatggtcatcaatctcagactctggccctctgaaactgtaagcaagcccccaatcaaatgctttgttttctaagttgtcttgctcatggtgtctcttcacagcaacagaaaagcaactcaacaagccacacgctaggactgctccaaagaaacaaagtatttcacaagggagaaaaatttgttttcggattttcaaggaaaattagaaatgctgagtcatggggtagaataaaatatagcaaatgataaatatgtctgttcatcaaattcaagtttgctgtcctggtggctgcatatgtgaacatttccacaagtcagtctttgttccgtgacaaaaggaatcagcctccccaaataaggaagggtttacatcagctcctttctctgctctaatgaaacattgtgctctgacataaagggtttgtgatggaaccagttatttttttccccagtctccaaataagacttaaattgcactttagaagtacctagctgtcttaaatatgatagagcataataacatctgagtctcagcattactctaagatactcaaggacaagtgtgagctgcattgtttatgggaattgtctacctctatgcaacagaaactagaagatttttttccctaatgtctttgctctgtgtattgtaactctctcttaaaggaaataattgaatacgaataaagaggagaaattataatagcatttataacattacaaataaaagtaacttcagcaaaaataatgtgcagaaaacatctctttttaaaaactactgcaaatttctcaaagaactatatagtgagtgtaatcatttcctgggacagagagagaagtggagcagacatggacacccagcgtgtcccaatcagaaggaggtactggagtggagagccaccccctactgactgttcttgctttacatactctctctctgtctctctctgtctctgactctctgtctctctctctgtctctctctctctctgtaacccttcctatcccaattccattactttgaaagtgaattgttgtgaacgcctcccatttctggggggggggcgggcggggggttaagcactgagatcaatgaaattaactgaagggcttttcccaaatacagatacctcagacaccacaccagatttcttgagctagactctccagggctggagtcccaacaagagtagctttaaaatgctctgattaggcatccctggaccaaacaacctggtctctaagttcagcctccacccaagtatggcatccttggcccattctctagttgaccttctagtcctctagtggactcgctagtccaccctccagtcaggcttgatgccatcccctcccctggaacctccccaagcacatatccctctctgagatacatttgagatcttctaaaactcaaatcctgcctccacaaagccttcgctggtcagctgtgactctgttcgctgacagaaatgattcccatcctctgagttaccatagcactctgggtacctggatggtgtggtgcctggaatgagaaatgtcccctagagtctcagcactcaaacccttggttcctgggctgtggtactgatggagaatctttagacggcatggcccaactccagtccactctctctgtctcatgcttacagttgaggctgtgagctcacagcttcctgctcctgcaaccatgcctgctgctcacgacgatggactctcatcctctagaagcatgagccaaaataaattctttcttccataagttgcttctgttcatggtgttttatcacagcaaagagcaatactgatggtaaatatataacatgaagatagtagagaatgcctagataggtagactcactcaagtgatttgagccatttctacagagtgtgaagttttgaatgaatgggctttgatgttctataatctgtttatagagcccatcaatgctccaaggaggtgtgtcatgtgtgttctgaagctgtcacctttaacacttgtgaaccccagaaacacatcagctgaagtcaacacggctgtatgacatcaagagaagacccactagagatggattaaaaacaatactagggatgaaagtgtgtgtgtgtgtgtgtgtgtgtgtgagagagagagagagagagagagagagagagagagagagagagagtctgtgagtggtatgagtgtgtgtgtgagtggttgtgtgtgagtgtgtgtgtgagtgtgtgagtgtgtgtgagtgtgtgtgtgtgtgtgtgtgtgtgtgtgtgtgtgtgtgtgtgtgtggtgttgctgttattcttgttttgctattgttgttgctgctctccgtctttatgcaatatgcttgctatggacaaaccctgtgtaaaaaaaatcccaaccacatctgtctacacattataagcaaatggtctgtttgctgtaaaccccgttaatatgctaacagacttgagggcctggcctcctgtggctacctctgaattataaatagcagctaaaagaaggaaataaactcaggaacaggtgggaaaggaacaaagacaggacagtgggtacctcaaaacctcagaatatcaaaaccaaatggccaaagtgtgttaacttttgagtgatacagcaaagatgcctgaaaggaaagccaccttccctggcctcaacagtgtctctgatttttttatttaatgttttttgtcattgatcccatatgatgtatgtccatccaccatttatagagacaaatatttacaattacaggcacacactacgagctgggtccagatgcgtgagaaagaagccagggaaagcaccttcagctagctcctttcagcttcccagggtccttccaccttttcaaaattggatatgaacattctgtgcctcaacttctaaacttatgagtgacctaaatggatccctagaagtccttagcaaagcaaatgaactaaacacagcctcaccagatcatcccccaagaaaaacgatgtctgtcacctctaaaaagccagacaataacacatactgaacacacagagtggcagttcctttgttctgccatgacataagccataggcaccacattcaaaagaatagtgcaggtttcccaccttaaagggagcattgcgtgtggttcttcctagtcccttctcaagggcaccgagcacgcatggtctgagtagcatgtgcaccagtcagtcagtctaaatatatagtaaggctaatacgtagcagaccaagagtcccgtgaaagtggagcaaaagggaggagtcgaagcaagtgatgatctgtggtcttttctccaccatgaaaaaaattaaatgcttttttttaatgtcaaaaactctggacatgacatggaagtagaagagacgagaaaggtaagaagagaacctgagggggacaaggtgtggctagtgagcatcagaaaagttgaatatcagtttctctcccatgcgtgggagcacaaggaacactgtttggggaggaggggatcactggaagggaggagagatggagagggaagtggggtagagacaaacacagtaaaatggtgtgtgtgtgtgtgagtgtgtgtgtgtgtgagagagagtgtgtgtgagagagagtgtgtgtgtgagagagtgtgtgtgtgtgtgtgtgagagagagagtgtgtgtgtgagagagagtgtgtgtgagagagtgtgtgtgtgtgtgagagtgtgtgtgtgtgagagagagtatgtgtgagagagagtgtgtgtgtgagagagtgtgtgtgagagagagtgtgtgagtgtgtgtgtgagagagagagtgtgtgtgtgagagagtgtgtgtgagagagtgtgtgtgtgagagagtgtgtgtgagagagagtgtgtgagtgtgtgtgtgagagagagagtgtgtgtgtgagagagagtgtgtgagagagtgtgtttgtgtgtgtgagagtgtgtgtgtgtgagtgtgtgagagtgtgtgtgagagtgtgtgtttgtgtgagtgtttgtgtgagtgtgtgtgagtgtgtgtgtgtgagagagtgtgtgtgtttgtgtgagtgtgtgtgtgtgagtgtgtgtgagtgtgtgtgtgagagagtgtgtgtgagtgtgtgtgagtgtgtgtgtgagagagtgtgtgtgagtgtgtgtgagtgtgtgtgtgtgagagagtgtgtgtgtgtgtgtgtgagtgagtgtgtgtgagtgtgtgggtgtgtgtgagtgagttgtgtgagtgtgtgtgagattgtgtgtgtgagtgtgtgtgagtgtgtctgtgtgtgagtgtgtgtgtgtgtgagtgtgtgtgtgtgtgagtgtgtgtgagattgttgtgtgagtgtgtgtgagagtgtgtgtgtgagtgtgtgtgagagtgtatgtgtgagtgtgtgagtgtgtgtgtgtgtgagtatgtgagtgtgtgtgagtgtgtgtgagagtgtgtgtgagtgtgtgtgagagtgtgtgtgtgagtgtgtgtgagagtgtgtgtgtgagtgtgtgagagtgtgtgtgtgagtgtgtgtgtgagtgtgtgagtgtgtgagattttttgtgtgtgtgcatgtgtgtgtgtgtgagtgtgtgagagtgtgtgtgtgagtgtgtgagagtgtgtgtgtgagtgtgtgtgtgagtgtgtgagtgtgtgagattttgtgtgtgtgtgcatgtgtgtgtgtgtgagtgtgtgagagtgtgtgtgtgagtgtgtgtgtgagtgtgtgagtgtgtgagattttttgtgtgtgtgcatgtgtgtgtgtgtgagtgtgtgagagtgtgtgtgtgagtgtgtgagagtgtgtgtgtgagtgtgtgtgagagcatgtgtgagagattgtgtgagtgtgtgtgtgaatgtgtgtgagagagtgtgtgtgtgtgagtgtgtgtgtgagtgtgtgagtgtgtgagattttgtgtgtgtgtgtgcatgtgtgtgtgtgtgtgagtgtgtgagtgtttgtgagtgactgtgtgtgagtgtgtgagtgtgtgtgagattgtgtgagtgtgtgtgagtgtgtgtgtgtgagtgtgtgtgagtgtgtgtgagtgtgtgtgtgagtgtgtgtgtgtgtgtgtgtgaatgtgtgagtgactgtgtgtgtgtgtatgagtgaaaatgtcacaatgagacctatcatttcataagctacctttactttcaagaggagaacaaaggaaatttggggtatggttgaagaggacacactagtgtcgtttatgtgtgactccagtgctgaaagcaggaggatttgagtcccaaaccacctttggattcacagaaggaccctgcttcaaataataaaccaacaaccaaggcagactaaaaacagctccttctgtctccagaagacaccccccccccccgccaccgccctacaaccatgaaggagacacagaacaggacagagacaaactggggagcaggtggatgacctgggaaagccaaaccctcagcaagcccctggaggagctgaaggcaaggcctgggcacaggggtctggatgaaagcctgagctagagtgggatcccagctcttcctcccctcagtaccctcccttccgtcaccactgaaggctagaggctgagtgtggggtcaacactgaggcacttggcatgatggagaggggcaatgtattaaaacatgcatagcaggtttattagggggtacaggcaacccttgagagcccaccacctttaccacccaggcctacttccactcattttgacatactgttaggaattaccctatggacaggacatggggagcatctcccttgaagaagctcatccaaagggggaaaatgacccaaggatactgacaacaagaaggtcccccacagaactgttgcagccagttcacctcaaggaggccaccttcaacaagccttccccaacacacatgagtccccactaactgcaaggagaccccccctctcatacatataagaagaggcctaggacaccgggtcacatgagggaaagaagggtccaaacaaacaagcagaaagcagcacccaagagggaacaggacccctgggaagataagaatgcattctaaaacaatcctgtgtgctcatgaattcaaaataagatggcagacagaaaatcccaatagtaacaagttaacatttaaaaaaaaaaaaaatctctcagaaatgcagccaaagacttacggaaaactggagagagagaaaaaaaaaaaaaggcaagaaaacaaaaacaagactgttcacatgttccaccatctgaacaggaagacttggaattgtaactgctccctactcattttgtgaagaaaagggatcactgagattccccaggatagcagacagggagctgaacattgagcaagccctgagagaacccagcaccacacatggaaatagaaacatacgctgtgaaattttactccactgtgaaaaggggagaaatccggagactttctgagtaaagagggggtcactaggttttgacagaagtacggagactcagaaaaaagaaccacgtgtggtggcactgacctgtggtcccagaaacttgagagggtggggctaaaggacccctggagtccagaagtctacactagcctggacaacacagcgaaaccttacctcaaaaacaaacaaatcagaaagagactggatttctcaattgcagcactgggaactagaaaataatggagcatggaaaatgttttgtaattcaaactttatatagtcaaactaaaataaagtgtgtgggtagaacaaagacatttatagacatgtgagatctcaaaacacttcctatgcaacctctccgaaggcggtgctaagtgttaaaggatgtgtcccaccaaaataagagaactggcaaagaaaaagattctgaatccaggagacggggagccaagctcaagaaggaggaagggactttctggggatggtgagggaagcttaggtctggaatattcttaaaggcccacatgccaaagttttgctccctggggcagtgctgttgggagctggtagaagctctaagaggtggggcctaaagaagtctgcaggtcactggggaaaagtcttcacaggggcagcaggacccgccccctccttccctgtgtttcacacttgaccatgatgtgagcagttttgttctatcttgcactctcaccatgatctgcccctagacctagaaacaacaagtccacacaagcatgaactagaaccaccaaaatggtgagccaaagtaagccttttcccattagaagctgattgcctggagtgtttgtcactatgatggaaagctgactagcacagtgctatgttacttgcccagactagagctggtcaggaggctccaattatattattaagataataaaactgatagaaatgtgtttaggcactaagagcagatcagatagtgtcctggttggcttttgtcacctttgacacaagcctagacatgtttgagaagagggaatctttttttttttttttttgcagattttttttatttgaattagaaacaagattgttttatatgacaatcccagttcccttctccctcctgtccttccctaccaccctcccccaactaaaaccctacctatcacatatcctttctgctccccctggatggtgaggccttccatagggtgtcatcagagtctgtcacatcctttgggatagggcctaggcccacccctgtgtgtcttggctcaaggagtattcctctacatagaatgggctcccaaagcccacacctatcctagggataagtactgaactactacaggaggtcccatagaattctgaggtttcctctctgaaacccatgttcctggggtctggatcagtcccatgctggtttcccagctatcagtctgtggagcaagagctccccgatgttcaggtcagttgtttctgtgggtttcaccagcctggtctggacccctttgctcttcactcgtccttctctgcatctggattccagttcagttcagtgattagttgtgggtatctgcttctactttcaccagctgatggatgaaggctatcgggtggcatatgagtcagtcatcaatctcattatcaggggagggcatttaaggtagcctctcctctgttgcttagattgttagctggtgtcatctttgtagctctccagacatttccctagtgcctgatttctctgtaaacctaaaatgtctccctctgttatggtgtctccattcttgttatcttctattcctcccctgactcaacctttctgctccctcatgtcctctgagtccctcctcttctccccttctcattctcctagctccctcccccttcttcccgtgctcccaatttgctcagggtatcttgcccctctcctcgtctccaggggaccaggtgtgtctctcttagggtcctcctagtttcctaggagaagagggaatcttaattgagaaatagcttccataagattggcctatagacaggtctatggaacattttcttgattaataattgatatgggaggtcccagcccactggcaatggtggtgccacccctaggcaggggattttaggtggtataagaaagaaaactaaagaagccatgaggagcaagccagtaagcagtgttcttccatagcttctacttcagttcctgaatctaggttcctgtcctgagtttctgcccttcctccctcagtaatggactataacatgtaaactaaaacaaatcctttctgactcaaattgttttttgtcattgtattatgacaacaataaaaaccaaaaccaagacaggcataaggtgtgaattagtagaaagcataaagaaagctaatcatgaaaaaggaaggaaggaaaaagaaagaaagaaagaaagaaagaaagaaagaaagaaagaaagaaagaaaggaaagagaaagctaatcatgaggctggagagatggctcagaggttaagggcactggctgttcttctataggtcctgggttcaatttccagcaaccacatggtggctcacaaccatctataatgagatctgatgccctcttctgtcgtacaggcattcatatattaagacagaaacactgtatgcataataaataaatcttgctggttgatggtggcacaccttttccccccagcacttgggaggcagaggcaagtagatgtctatgagtttgaggccagcctggtctacagagcgagtgccagttccaggacaggccccaaagctacacagagaaaccctgtctcagaaaaccaagaaaggaagaaaggaagaaagagagagagagagagagagagagagagagagagagagggagggagggagggagggagggagggagggagggaaggaaggaaggaaggaaggaaggaaggaaggaaggaaggaaggcaggcagcaggcaggcagactggaactccaggtccaggggatcagatgccctcttctggatcctacaagcacctacactcatgagctcatacccacacacagacacacacatgcatgcccataattaataataaaaaaataaataaaaggataatgtattttggaaggaagggtggaaggaaggaagaaaggaaggaaggaaggaagaaatgaaagaaggtagaaagccaaccaaagagaaaaggcaaacattaacttcaaagggaaaaaaattatgtgactaaactagggatcataatgtctaataacttcccaacccaagtttgcatagttattgctgttaagaaaactcaagatgtccaggtgttggtagcgcccatctttaatcctagcactcaggaggcagaggcaggcagatctctgagttcgaggccagcctggtctataaagctacacagagaaaccctatcttggaaaacaaaaacaaaaacaaaagcaaaaaacaaaaaaaagggaaaaaaaaaaaccaagatgtatgagttgattttctgagttagctccattcacagctctctctctctctctctctctctctctctctctctctctctctctctccctgtctctctctctctccttctcttcctccctccttccctccctccctcctacttgcagataaaatatgtaggttatcagctactgctccagcaccatgcctgcctgcctgcagccatactccctgccataatgacgatggactctaaccctttggaactgtaagcctcattaaactctttcttctatacttacgctgtcttagtcatggtgtctcttcacagcaatagcaaggtaactaagatcctttcttgattaggtgccttttgtatgtactactttaactagcaaacatgccctgaggaagagaagtacattccacaaagtcccacacttgcacacttgtaaaatgacagagacaagatggacggctagtcccacctctgttcaatgtgctacacagtcacagacagacccccaattttgcctcagaaactccttgaacaactttatgatattaaacagttctgcctggtttctaattaacttcaagatactatcccattgaagggactcctgcctgatttggatttgagaagccaggagatcagagatcactcattttctaaagaacagacagtgattccttttgccatggccaggaacccactggctagcagctctcaatcgtgaaccctagagagactaatacagccacatatgctattaaaatgtccccccccaaaaaaaccacacataactttagtacatgctgaggagagggcacatataaaaacagccacaaaaagtcctatctgttattatgttttcaatggaaacaatccagaattccacccatgtcagaatgaatgaacacactgtggtatattcacatgctctgagaccacatcgtgataaacgggaattcctaacagtggcacacaaagaccagatgaatcccaaggtcaaatatttgagtggaaatttgagttattgaaagcacagaccttatgattctactttgcatggtcgaaagacacacaaaactaagccacagattatttcagaaatatagcaaaaaaaaaaatggtgttttgaaagagagtgaacagtgaactcaaaataattcaggagactgttagtatctaaggaagaggaaatgcccagtgcaggtctcctctatttgaaatccacacgtactgcatcttatgactgttccttatgaatatctaatcaaagcaattaaatggaatgatgactaaaggaaacacatatggtgactggcatgcctcagctgcccattcttcttctaattcttgtttcaccctaaatattttaaaataaatttgagcaaaggtgagtcgtggttttcttgcaaatcaaatgatagctgatagcctgaagggtgtcacaggttaggagttaaggtctattgaaagtcaaggacagacaaggcccccactactggtttccaccaggttcattagaccaatgtagctaaaaagagacttctgggcctggctcccttcctccgagagctcgttcccagggttctgtcactaactagaaagctttgtgaaatccttgagacaagcagaagcctgtgcagaaaggactaaggatggggggagggagagggggttgggtttccaaatgtaacacagtccacctggttgcggggtggttcaggctgtgtcatataataggcaggaaaggagaggaacagagtcttctcaatgtctgctcttagaggatgctcaggccctagaatacacagccccaaagcaatttgaaagcatctgtcacaagaagagccacaccatggccatgaaggtctgtctcttgtctgcctgcagtgttgctctctctttccataaccttgaagctgcttgggaaacagaaggataaacaaaatatctggagttgtattatttcacctgagaagacttcagagaagtggcatccagtcaaatttctaagttaattaaaattactctttttttttttttaaaggcagaagattaggcaaaaactaagtccttactggcactcgctatcaaatgacaagagaaagaagagaaaggagaggcttggcctcggcgacagtggcaggggaggacgagacgcaggacagcaccttcaacagtcactaagcaccgcttattgtgtgtcaggcctggggatggatgcgtcttactaaggagaaggaaaatgtacactgcttgatgtgaggaggagctgccatgagggctcaggaaaaccttcccagggaagcattgtctaccccagactctgaagtgctggcagcaagggagaaagtctggacttaacaatggcagattcagacatcagtgctcgtggccctaggaagacagctagaagagaaggccagacacacagaatgcaaggatagtcggttcagggctcatatgctgcctgacttaaggtccagtggacaaacccaataaatgtgcctgctctatccattgtaacaaaatttgagatatagatcctcctcactcatttcccatagtgcattgcacccttgcagtgatgttcaggtcatctagcaccaatagggcagtgttttggacacacaatcaaatggtgaaattttaaacccccattacaaggttctttacaagaagaaatataccaggggaagatgcacttcacacctcagatttccacccctagaaacccactattacatattaaaaagtaaccccaagctttgcgaactattttggggaatcatgacctgttttattgcctgcccattatgaagaaaacctctgatgagatgaatcatctgggctttttagatttccaaatctgctcacacagggtctcagggtcatttataacaagactaaagggacagggacagggctgctggggggtgggtgatgcctgctcctgtgacggctgctctggctctcttagactgactctgttgggatccagctgagctgtctccatctaggtattattacacatttatttcaaccgtaattattccttcatgcagtcagaacccagtctggtgtccagcaaagtggggcaatcccacctaggcacatgagctaagcagctagtgggggtacaatgaggtaaccctgccatctggcacttggaagcaaggcttgaggctcacaatataccctccaaccttgaatctgactttcctgaggcaaaccaaatggtaacacctacacaactctcttcagtgcctctggtcacatgggtccattgtgtgacttcttaatctcttcaaactggcccttaaattctccttctaaactgatctcaccaggataaaaatgttgggttgtcaaggggaagcaagaaagtgtacaagtgtgatttgccccagggcctgtgcaagccctggtgatggccttaaccacacctatctggccaggggcagtacaatggaaacaataatggattatttccctcaaaagactagtatcaaagctgcagctaactcattctttatttttgtcatctttagaaaaaagaggtctagagaggaatgctcagtggataaggctcttcttatccaagcttgagaactcgagcaaagctagacaccatagtgcaatcccagcactatgagtgagatgggaggcaggcagagataggagaatccctgggagagcgtgagtcagccagcctgccatacttggtggcaaacagtaagaggccctgtctcaaataaggtgggaaatgagaactcatgttcatgttgtcctctgaccctctataagcttgctatggtatgtgcacacctacacaatcatatacaactatgcatacatgcattgcacatatacacacatggggggagagagagagagagaaagagagagagagagagagagagagagagagagagagaatttcttaaagaaactagatggcatggggtatatacctgtaatccaagcccttgagaagctgaggcaggatggtgaatctgaggaatctgaggccaatctaaacaatatgagactctatctcaaaaacaaaaaacaataaaaaggtattgctatggtttgggatctggaatgtccctcaaaggctcatgtactaaggtttggttcccagggtgtcgagtggtggagtctttaagagggagggcccagtgggaggccttcaggtcactaagggcatgcccttgaagaggatcatgggagggatgctagccccttgttttccttttttttatgcctatgggatgagcagttttcctctaaaatcattctttatcaccacaggcccaagagcaaacaactatggattgaaccctctaaagctgtgaggcaaaatcaacctttcctcttcgtaaactgtttatctatcacagtaacagaaagatggatagcaaaatatatccctaaatggtcacaagtgtttcttctgacacactgtgaccattgtacctaggacacagagggtctctgaagcgttgattgatggagaagcatagacgaccaccatcagagcctgcttgtttgggaaagggagttctaagaagtcaaacccctcacgcacagacctgaactgtccagtatcaggcacagctcacacaccagtgattgggggtcccattctagcaaatcgagtgcaaataagactacctttttcacgttaggtcccacccgggagccccctgccagaaggcatgcaatcacgccatccatgggctttgctgaagattctgtcctagctgtgggaagacactggagatgccactcatagcagagatgtgaagggagcagatggctggtgaaatggaggctattctcaacccagggcaacaggaaggctggaaggcagagcccaaatttagtttgaaacctggtgccggatggtgtagatttagaaatcctcttgaaccatctggtttttttttttaaataaacacctgtctgtccaattgtagaatgggaggggcttaaagtcttactcccccttcccactaaatgcagcatctgggccattcttagtgccttattgccgaggaggggcttggcaatgggaagatccctcattgatgactcccaaaggtctcagcaatgggaagatccctcatcaatgactcccaaaggtctcagcaatgggaagatccctcatcaatgactcccaaaggtctcagcaatgggaagatccctcatcaatgactcccaaagatctcagcaatggaaagatccctcatcaatgactcccaaaggtcccaaaggtctttgcaaccctctttattctgactcctcttttgctgttctccttttcctcaccctgcttgaggctggaggatgccacacatgcatgagcatgagcacatgccatgcacttgctctaaaatgtcctacatctctccattttccagcatcatcccttctcgttctgtgacactgatataattcatctgtgatccataagacatcaaccctttaccctgtgtaaactcatctctcttaagtattatgaagtatagtgttcctaccaaataaatatacacctcagatacgtataaataatgtccccagtgattctgtcaaatgagccctccatccttggcacagccactaagtctaatcttagagtcaccacctgaccccactatgctcaatacaagtgtccactcctctccttttagaccatccttcagtcattcttctcatgggtcaaccctttgcctctctcttatcctaaggcctgccgctctgtctctctgggtgccaggttagatcccacatgcctagtgctccttgaggactatgtcatgaagacatggggaggagaacatgaggagaacatgaggaggcaaggagagtcctcacacctcacctgtgtggccctgtgaaaggaaagaagacatgctgggtaggaagggcctgggccactctccactctgggacagtcggtggttgacaggaagtatccaaactggcttcactcttacagggtcccacagcctgcagaaatgggtgtctttaatgctcttgccacacccagtcagggacagggacagcctgggggaagcatgacctccagagtaatggagaaactgactttgccacatagatcctgggtcaaagagacagaagaagaaatcaaaacttggctcctgcccgtaccattccccaaaactagttccagctagactaaagcctaaagtatgaaagctaaaaaccataaagccttccaaaaacacaggagagtttatgatggaaaaagaaaccctatattccataaaggaagagagcaatacatcagattacattacaatgaagaatttccattcaacaacattaagacctgtttgggggctggagagatgactctgtggttaagagtacttgctgctcttccagaggacctgagttcagttcccagcacccacgagtggtttacaactgcctgaaactctgctactaagctgaatacctcctctccactgtgagccagaagtcctcttcctaggtgtgggagtcctgagtggttcgacataatctataaagtgcccaggaaagatgaatgcaagaatgcttcagccacggtattcatcgttgctggtaagaagttaagtgtccaccaagaggacaaaggagaaatgcactgtggtgtgttccttctcaggcacaaaacagtgacaatgagtgaacgagtggtgtttggggaggtgcacttcagtggtggaacccagtggttccataaacccagtggttccataaaaaccataaacatatgatgctcatttaagacaggacacttgtgacttttaggaaggtggagtgttcaggggctcctgggatgcaggctgagtctggtgtctgtggtgctggggactaaagccagggcctcagcacaggcatgtgctctccaagagtccaagagtccgctttggatctgagtgtttatcttataataatgtcaaaaccttctccttatactttgtacatttttctcaactgtgatacatttcacaactttaaggggaaaaggaagaaaagaaggagagagggagggaggaaggaagagggggagggtagtggctggcacatgcctttaatcccagcactcaggaggcagaggcaggtggatctctgtgagttcaagaccagcctggtctacaaagcgagttccaggacagccagggctattatatagagaaaccttgtcttgaaaaaccaaaataaataaataataaataaataaataaataaataagtgatcagtcataaacaggttaatttcataacataataagccatgttaatcttcttaaaaatgaactaggcaacaaaagggattgttagtagatagacgttgaggcagaactgcctacctagaattccaacttacataatggtgacattgctgacccatgaggggaggtgaagcctgcccccttgcctccccaccactggggattgcaaagaaagacgtcactgtgactcacctaggcagaggtgactgatggctgactgtgccagggatctttagagactgccttctaaagggtacactgataattactgggtaagccggcaggcactttttcattcaaagacatttatttcttaattaaaacagcatgcaaatgttaacatttattaattatttcactagttcacagcaatataattaactgacttttaacagctgaaaatgataccaccatccttgagaaactgcagcagtcagtaagtagatatggaagtcaggagagctgtcatcattccagtctctctccatgagccaccaccatgcgtgttagtactcaggcatctgcactggcctgtccttggggttctgacaggattttccctcagcttcggccactaagagcaccacctgtgcacattcactatgttcccttttaaaagggtcctgcccaactcccatccttctctctccctctccccttttcctctctctccccctctttcttttcttttctctcctgctgctcctgtctccggaggccagtctccccccttctatttctcctttttatgatcccctttcctaataaaaaaataaactcctctcttgaaccctgtcacgcggtgtctttctctcactcgccgctttccttaattacaataataagagaggggtgtcattcactggccctttccatgaggagagcatactccagcagggacaatgatttccgagcatggtttagggtccccagcccacgtgatcagaaaaatgcagaactttcagttaactgtggaggtgtgttcctttatccccttggaatgccgctgctcccacttactgaattttgggtgggcttgtaggttgcaccaaccaacacaatgtaaaaggacaactggggccttccagcccgagaggtcagtgccccagtgcttccagaacctgagaccatcgcactgagaagctcgcccagcctcctagaacacaggagaacacacagagggttccactgacaatcagcagctgctggtgacatgggtcaccatcagatgacatcagccatgtgagtggctctcattctaaacttgcctcttggcagtgagaccatcaacaagcagccctgagtcccttcactacggcacagagtggcggtcatggcagtacttttccatgctggctatggtaagcaccaagtaggatatggccaccaggtgctggggtagagctgctcaaatggaaaggtgacagtgacagtgacagtgacagtgggtgtatcccactagaggactccagtagacagccgagaattgtctgagaacccccacccaaagagtggagagaagaggttctgtgaagacactttctcaggggtgctccctctctcatcacacacctgctggggacagatcctcggagcaccagtgtgtatattccaggttatccccacatctcactggtgcctaagaaagctacagtagcagagggcagggctgtgctgggatgtaaagcctgtcccctctaaaagaagagaaagggcatgaagacaatgacagctggcctagaattgtttccccttctgcccaggaagatcacctggaaggtgacatcgctcctgggttgagagggtactggagaactgagaatggggcctgtggcagctggaggtctagagagctgttccacacccggagatgctgcctctccaggggcatttgagggaattcataagaaaccggtttaaatggctgtcggctctacagagcacaaagccagctagcccagaatagtacctgtgaggtagatgctgctattaccatttagaaaccggaagtggacgcttggggagcttaactggtttgcctaacgtcacaatgcagtaagagccagaactaggatgagaaacccagcacgcatgactcctgtctggattcttcaccccccaggcttgttcggattgctggtagccagcatgtgaaagacacaaacagccacacaaggcagagaccagatgaccccgaggctgaaatgcccaactatcaaccaggcaacaaagctcacacctgttatcccagcactcaggaggtggaggcaggaggattgcaggtttaagaccaggcttgggtatatagcaaggtactgtctaagggataaaaaggaagaaaaattaaaaacaaacaacagggaacagacatgtcagagtctcccttgtcccaggagggacagtgacagcccatgaggacaggcaataaattgaagcctctgaatgggggagcccctcccataacaccaacacaccttgcccactcaattgatcccagttaaagcccacagatgccaatgaataaagccatctggggcaagaggagtctcccagcctcctacctagtgagagagtcaatgttctgcctctaaagggtaaactgtagctctatgcagctatgataatggctgggtacactgccatctcagtaaatcccatacaaagcatagccatggaccgcaagtcattcaagacaaaggaaagggtttgagactaggagagagagacactgtgtgtgtgtgtgtgtgtgtgtgtgtgtgtgtgtgtgtgtgtgtgtgtacctctgtgtgtatgtctagctcaaaactataaaaagaatatggcaaattcataatcaataaatgtttaattagatgtctacaaagtgacatgacaacctcatttgttaaattattattcacgggaatttcattacatttggaaacaatctgtattttaggtttttgtaattacttcacaagaattccaagtgtgaatgagaaatcacagtaaattgtgaattaaataagttgttcatagctagatcactgcaaaggaaaaattatttttaaaaagtcttccaaaatatttacagtaaagaaagttatatttaatgtggaattttttttaaccagatagggtgggggcctacagagaaaacagttcctagactctttaaacaggcctgctaatgtcaaataagcaaagggggaggggtgaaaaatactgagttatccaaagccatgaacagcactttgctgagcatgctagagatgtggcttcggggtagagcacttgactagtatgctcaaggccctgagtttgatccctagtgtacacacacacacacacacacacacacacacacacacacacacactagaattttggtcattattaactcttaactaccttgagaaggaagcgtttttgtgcctatgagcagagaatacggcgtaagactgcccccaccccgcccccgttcaagtcctgtcctatacttactgtgtgtttctgaagcaagtgtctcaatctttctgaaccttgttttcagcatctgtaacataaggacgctaactgaagtcacgagagaagcttgggagaattaaccaagctgatccatctaaggcacgtgcactgtgcctggcacacagtcggggttacatcagcatgtctgtggaagcagatctgcccagtgaacctgatgccacagcctcactcttaggccatcattaccactttcatctttctaaagtgagtgtgtgcgaaagcaagatactgcttcaaccagctctctctggatcatggccagggtgcatctgtcacgcagcagactcgggagcagggagtaaagtgagaggcaggcgatagtaggtagagacccggacatgctgggcacaggcaaaatgcactgtcggagtggagtttcttatctgtgccagcccgaaaatagtgttctagggcagctttctgtggaccggtggttctcaacctgtgggtcacgaccccttcggggtcacaggaccctttcataggtgtcatatcccaggcatcctacatatcagatatttacatcatgacacacaactagaaaaaatgcagttgtgaaatagcaatgaaataatgttatggttggggtcaccacaacacgaggaactgtattaaagggtggcatgcattaggaaggttgagaatcactgctctagatgattcatgcctacagacatagacatagagaagatttgtaaaactgaatgtacccataaacaaaaataataataaaatcaatcgttctttaaaatcatgacaaaatcatcataaatcttcagagaagagctatgcaattttaaaacaggaatttaatgacaccatgtgactgcaaagctttgagatctgaaagcacatcctgagaagtgacaatagatgttgccattcctgcttaactaacagttcccaaggctatatgtcctcccaaggtgctagctacgtcatgtactcgtttagggtacttgtaggcaggcattctgtcctcccagggggggtcatctcatgagagcacatcccaattgtgcctctaaaaggccattctaatgctctaataacgccagtggcttctaatagagaactatcagacaggacctctgagatccactgtaacaactactgggatccccattggctacttgacctacagtgacctacagtgattatcatggatccattgctgggggaatctaacactaagctgcaaaggaagacaagacaaacccatagctggacataggtctgcagtaagcaggaggaactcccaacatttctacgagatgggatctagtctcatcaacttcccaagagataccacagcaggagtgattctgatctctgtggctggtgactggacactctgaagtggctctgtccctttcacacttggttaaggcagccatgctattgtggtcacattgccttcatcctgacatcatggctactctattgtgctggcactagggaagccaatcaaaaaggctagcttaagtcacctggccaaaccatcctattcatgtgttgcttagcacccggtctctagtagatgctgctggccagagcatttgacctctgacctaacaaggggccctgagtatactttggattcccaagaacaaatgtctactctgaccatatatgcagaatgtattagttactttgcttgactctgcaagcaaatgtttgacagaaaataacttaggagggaaggatttcttctgtacacagtgtcaaggtggaaggcgtagcagcttggtctctggccttggcattgcagctgatcacatcatgtcaacagacaggaagcagaaaaaatgcgtaggagcccacaccagaatataatctataaagcccatctccagcagtctgcttccaagagccaccacctcttaaaagatgccacaaccccccaaaacagtgccaataccttggactgacccttcaaaaacagtgtcacctgctggggagcaatgtcccccaaaacagtgtcaccatctggggaccaaacacccccaaaacagtgccaccagttgggggctaaattccccccaaaacagtgccaccagctgggaccaaacatccctaagcagtgccactagctggggcccaggcattcaaattcatgagccagtgggaaacacttacatttaaatacaacatgaagtattccttgaaatgtcagaatatccccttttccagtaaaccggagcccaagttaagtatatgaaaatgggtccctttgaagaactgtgagaactcgagcaatctcctgttgccatggtatttcagggtatttctctagcacagactatgggtaccttgcctttccttcgctcaagtttaagtctgaaaactgactcatctagaaaactggacaaaagattctgactggggactttatttacttgtatttttacatgtatagatattttgctttcatgtgtgtctgtgcaatgtgtaattgcagtgccctcagaggccagaagatggtgtttaatcccctggggctggagttacagatggttttaaagacactgtattaatgctaggaatccaacacaggtcctctagaaaagcagccaggttcttagccatggagccatctgtccagtgccaaagcattgtagctttatatatgagggccagtgaccttcagcttcctgattctctgtacagcctgttgtaatttaagaagagcagcacgagagagaaaggcaccatgtgacaggggtcaggcagaggggctttggattgtggaaaggggtcataaaaaggggaaagggaagggggagaccagccttgggagacggaagcagcagagagaggagagaggaaagatagggagacaggggagagaaggaagaaagaggagagagagggagggaaagagagagagggtgggaggtgggcggggcccttttaagagggaacatagtgactgtgcacaggtgtgtcttagtggctgcagctgagggcgaatcctgtcagaaccccaaggacagatcagtacagatgccataattctaacacaacctgagccaaatgtctccagagatagtatactccttcaaccatcgccacatcccctaagcatcaggtttccatgggtaccactctgacttttctctcttatattaataatgttccatctggcttctattaggtgccagcatctggctcctactgatttgggggtcccatcatctcatggctataagaaaacccagttctaagctagcacctactgacctcagcccaacctatagagtcgcacagagcttctcgatgactccagtgctccctctctcgaatactccgcatgacttcgttaaacagatgtgctgaagatctgccctccaaaggtagtaaggagaaaacagtcacggacgtgattgccaaatgtgtctgcggacttgccaccaagtacagtcacagacccgccaccaaatatagctgtagaccggctaccaaatatagccacagactggccaccaaatatagtccagacttgccaccaaatatagccacagacctgccacaaaacatggccataccactaaatataatcacagacttgccacaaatgtagtccttgatgagcatcccagcactgacagtgtcttcactcttgcatgcccaacttctctgggtgttttggtcacttcttccactcatgactacagcatttctgacatttctacctcagttaaaatgagctgttctgtttccacacctccaagaaccacacacatattacatccacatcccagagtctctgccaagctcaacttcattgcccaactttacaggttgcttgatctgggccctcggaatgctgttgtgtgttctcttccctcctgcggcactctggtgattgtggccctgttccctttcctccaatagcagccagattacagtattatagctcagtcccactcactggcccagtggaccttgtcttgaagcaagagaggctactggcctctaatagggagcctccaacaggcctgtgagggtgtggagggattgggaaattcaaggctatttactcaaatgatgccagcagtccaagaatttcggggttcaattctgcccaactcaaggccttgacctcaaaatagcaaaacttgcccaaactgagagtcagcctcctcggggacacagctattcttgtaataaagctctgggtttgattctcccatcttcctgccatctggctgcagcttcacccttagcctttaattggtgattaaatttgcttgcttacagtttcagaggttcaggccgttatcatcatggcaggagcatggtggcaggcaggcagctgcgatgctggagctgagtacatctggcagacaacaggaagtcaactgactcactgggcagtatcctgaacataggacatctcaaagcctgcccctacagtgacacacttcctccaacaaagccactcctcttaatagtgccactccctgtgagattatggggaccaattacattcaaactactatagccctatcggatatctagagacattctatctgtcttcttttaaaggttcaccttcccctacattggcacagtgcccaccacagttctctgcacagattaagtgaatgaacagatgttaggacatatgcctggatggatgagtgggtggatagatggatggatgaatggatggatggatggatggatggatggatggatggacaaatggatgatggatagatgggtgagtggatggaaggatgagtagatgggtggatggatggatggacaaatggatgatggatagatggatgagtggatggtgaatggatggatgagtagatgggtggatagatgagtggatggatggatggatggatggatggatggatggatggatggacaaatggatggatgaagttccactgaatcctgctaaggtattctgagaaagaactaaaggacttctggaagccactagcatatactaggattttcatctgccaagagtgctaacaatttacacagggtgattgggggctctgaatagtcagtgattaataagagatcaatagaatcaaaactgaaaatgaccatggacaactaatctaaatcctataaagcttcagtctaaaattcagcctaaagggaccctgcccactacaccctggaatccttctggattatagagctggttcactctcaacatcaattcctttagaatattttgccaagttggatttatgataaagctaacaggcaaggccaaggcaagagaaggaagagggcagagtttttttgtttgtttgtttgtttgttttggtttttggttttgttttgttttttttttcttttagagacagggtttctctgtggctttggaggctgtcctggaactagctcttgtagaccaggttggtctcgaactcatagagaactgcttgcctctgagggcagagtttcttaacatcagaaaacgctgccattgcttctagataagtccagggtgatgaggccctttctattctctcccagtcatttatcaaattgcaagaggcactgaaacctccaaagtcattaggaaatcttcaacctcaaagaccaatgtcctttcattcacttagcgtcctgtgtggagacaacctggcaggctggaaagcaggtggacccacagggcatttcctggtcttcctgccactgcttcaaaagttctcattaagttcttgaatgtctcattcctcaaatctgattgtcgcaggctttttgctaaaaatacattctctatccagagccctgctgtgccctgtgccagatttacctcatctgtgaaaaccactggaggacagtgggcgttacagactcagacacatgttgtcagagtccaggcttctgctgaggtgacctgggggaagataaatttcaccttccctgaggtcagtccgccccagccctctaatcacaagattggtctttttggactcaagtgcttcgtcatctcattagcataaactgcaggcttggggatcacttgggaaaatgcagtagttttacagacttcatgccaggaccccaaaacaagactgagtctttataacatagcagtgagaggacggctgcagctgctttatggagagatgggcctcaggaaggcacacggatgctcctactggaccactgctagggagactccttggctgccttctcgcctcctctcccctggtccatttcccagatctggtcttcagccttccctgagtctggttttgctgtaatatgtttgtttggttgttgtctttttgttgttgtttttggatggtttttttcttcttctttcatacaatacatcctgagcccagcctcccctccccccacttctcctagtcctccaccatctcccctcccccccagatccactgctcctccatttcccttcagaaaacagcaggcctccagggatgccaactgaacacggcataaggagatgcagcaaagctagacacaaacccttatatcagggctgttttgctggacagttgctgttttgggtgttgtgttttgctttaagttatctggaattggtttctcctattttctaccaagaaccctaactgccatacttttttatcccccgtgcatcccttggtttccatagttttccataaaatggattgtggctgacctgagttcctaagtgatgtgtgcctattccagatgcccacactggttttcagttccatttctgaattcccaagaaagaaaaatctcatcttcccacttggtgctgtacaccctctctcagttcaacaacatgtatctgggacaatgacactgtaccatgctatgtggtggccaggactgcacacatctaaagtatcttaaaaatagaaccctcaaaagttcctccacacaaatgagcaagtaagaggaaaaaccatgactgccaataaggtaaacattagctaaggatgcacagaacctggggtgactatggtgttttgaacccacaggaagggttctagacagcccatggggaaagaggtgaaacgttggcaggaaagtgggggcgggggatgaactaggaagtccccaacactggaaggaagcttcaatgtgtggagaaaactgggaaccactgggcccggtggcctttcatcaaacaaaggcatcaagtcagaatgaaggtgccaagcatttcttagagattgctgagtgtggttggtgatggagggagaaggatgggagctcctgaaaagattttcagaataggatgaacagttagtatgaacacgcacaaaacccaaacttcctgatgaggacgcagtgagtcacaaagctaaaaccacccgacttgtgaatcttttttgtgccacctgagggctttccatgcttgtttctctgtcacccttccccgtctgggcaaccgtgtgggctgtggctgcaggggcctctgggagctaaccaacagccatttcttctttgcaggtatcatgcatttttgctgacacagctcagcttccagtcaattctggaatctttctctgctgcctgccccttttaaggctttttcctctcatctcactgttgctcaattatttcaggacaactgtccctcctttttacccctgatctcttccacgtacaagccaaagcaaaaatgaccgtaatcatgaacggtaactatgaagtagtttcaatgacacatcagcattaggaaagagatactatatatctgggagtgtggtttaatagtggtcataaaacaaacacacaaacaaaaaaaccaacaggaacatataataacatattagcaaggcttggaaaggacccaaattttcctttaaaatcttcaccacagtatccatgtgtgtttcagcctttaaataagtctacttttccacaggcaccatcattcagtaaaaatgaaaacctttgtcaatatatttcagcgatagaaggttaaattacttatataaatacaaatatggcaatggaaatgttctctgaccatattttcttgcaaatacacaatatggaatcaatattaagagtataaactgctgtagtgggccagctcaggaacctggctataatagatttttaaaaacatatttatttatttatttgtctatttattggggtgggcttattcatggagaacagaggacaacttgcaggagttggtttcctgtttctgccatgtgggtcccagggatggaactcaggtcatcaggacggcaggtatttttacctacaaaggcatctctagcccaatgacatttttatgaaaagctgcattttatctttcaaacaaacagactttgaagatggtctttggtaatgtagtttctgaaactctaacactgccttagtgcaatggctactcttggttgtcaacttgactacatctggaactaaaacacaaacatggaggccacacctgtgaggggcttttgcttaattagaagtgggaagatcctcttctaatctggactctgaggtgggaagacacccctgtcacctggccacaccttctgctaaaagcctacttaaggacatggaagaaggatgcttgctctctttgcctgcttggcctcaccttgctagcaagtccattccttacccggcattacagactacttcttcaggattcgggtgtctactgaaaaccagctgaaacacaaagcctcacgatctagaaactactggattcttggaccttccattcataggcagccattgttggattagctgaaccacagtctgtaagtcattctaataaatcccctttctgtagagagagagatgcagtctctaagttctgttactccagagaaccctgactaatgcactcaatgggatcaatattatgagtataaactgctgtagtgggccagcttgggattccaatgagaaacttgagattatttatttactttgagcatagtggtggagaattggaatgtgcacgtttgatacatacatgaatttccttttgtcattactccgttggctttggtaagcagccagttctttgtttctcttaagcaatcgttatgaattctgctagctcccacagtgaaaaaaagatgagctagaggtatgagttttaccacgtgagtcttctaaatatatttattaatgctccttaattctcctcaaagctgggtgcgtctgtcagggcacagcccttctcgcttagcttagcgctgctgtctcacttttattgtccacacagccagatgcagctgcatttatttacatttttttaaatgaatgaaactcttagcttgttgacatattggaaaggctaaaaatgtcccattaaactcctgctcacaaccacatccgcatgggtggcagctgaattagccccactttgtagcagagttgattttcaagggagatgtttgcaggaaaatgaagggtttggaaagccttattactgggtgacacagaagaggctattttggttgtgtttcaagtttccaagagaaatttcaactcaaggccatgagacaaaatcgcaggcacaaaagggaaggagagacactgtacttcggttcagacttcccgcagactgcttccccagccactggatcaccttggtttgaacttgtggcagtgaaaaagatcagacactctggaactctcaccgcagacttcccagccaacctccaattaccacactgtgtcatccgaatagtgcccactcatttgtaggcagctatcaagaggctaccatgaaagaaagaaaccctgtgtggcggaggctacaaggcaaggacatgggagtagacagaatccagtggttgcccttaggaacttccagtctggaaggcaattgactggtgtgctgagcaaaatgaggagaagcattgaagtagagaagtaagcagatggttgaagtggggaatgggtcaaagaagccacaagaagagatgggttgaactgtcagggaattagatcccataggtggcaccagaaatggcatggtcaggggaggatatagccagcgtgtgagcagagatggcgttgtccatgagaaaggtgagaggtacttagggctaagtcctagagagccttaaagtcgtaacaaggaagtgaaccagatacgttgggcagaggcaggttttgagaaggcaaaactatctgaccaataccagatgggaagataggtcatgtgacaaagaaaagattatgttagaaatctagaatgtcacaagttgctgagataatcctgaagagctagtgggagcagcagcaccaaagcactgagagagagaaagctcaaaggaagagaggacacagccaggggagaaaaaagccagatatgtggcccctgggctcccttcctccctttcttcaagggaaaggccttcacagaaggcagctcttgtagaatgagatcctctgaacaaaactgccaccatcttcagcaaatcagctgtgcctacttgcaagagactagcagatcaggcctgctgactgttgatatcaccttagagtaggaaagggtgcagagcttcactggaccctcacctaggattccagaggcctcccagccatttggatgcaattctaccctaattgcacacagcccctggaggtgctagaatgcacaggctagggaagattaactagaggaaagcgggagacagatagctccatctacacagctattaagaagccatcatcccattctgggtgggacttcctagtgaagctgctttggggtctgtggggcaaaaagtctgagctcacttccaggttttgaaaatcaatcaattcctgagctcgaaatcccaccaatccctgagctcacctcaagctcaagaattgaaatcccaccttagaaaactccacccccaagaaacccaatataagtctgtctcccactcagttctctgttgcttcttacccaagtggagacagccacctctgtgtctttcccaataaatctcttggatgaggtttgttgtatggtgtgaccatgtggtattccttggctcccaattgccaggacacttttcccttcagagctgcaatacttccactttggaagactttcccctcggagttgtaactcttatagggtcacacattcagtcgaactcactggtcgctaagtaaagctttggcggaaccacacattggttgtccattggggcctatgagaatgggacaaatgttttttacacatctgcagggaaggaattctagcaacagcaactacctcctgaagctaccataggctcttcaagctctgggaactgctacctgcctgttcatcctagagaggtaatgacacctgagttagcagtaatgacctagttgtcagtagccaaccctctccattcctgttggttctcctacctgaccacaactgtgtggttcccttcattaaactctcatcagttactgttgagaggcctctaggccaggtccctttccagcccatgcaactcccatcagccccactgtgccatcacagctatcacagctcagggacagcaggtcactaagttcactcagtgaggttcagtaatgtaagacaaatgaaactttaggtcaggtaaacatccatgaaaggggccctgtaattgtttcaaagcgtaacaaagtaccacctagtaggtgacttacagcagaagaaattgattggctcacaagtctggtggccagagtctgaaatcaaggtgtcgggagggccatgtccctctagaacctttaagaatacactcttgttttaggtctgttggtaatcttgaacactgctggctgtggtcagacttttactctcagcctctgtgatcacacagcattctcccgagtgtttctgcttcacgcggccccctcttttctgagcctatgcacaagatgacctctagtgagagtatcattcctatcattaattagggggtacctaatggctttatcttaatttgcttatatctgcaaaaacactacttgctcataaggccctattctgacccactgtaggttaggaaagcaatatatattttgggaagatacaacttagccccgtaacagggcaccatacccatgctggtgttggcaagtgtttctacattctcctgagtccatggtcaccacttccacagatttcagtgcaaaaaccaactgtcccagctctgagacctctgagaccatggacttgcctcttggatatatatcaggctggcaatagaaccttagtaagacaaaaattctagaggcatgtatagacactgctttcatctggagccaaattctgcctggatcactacattctcctatttggaatgccctcttctgtcccttccgtttgtatgaatcagccaaacctagccttttctcacaggctaaatctggcttctctgttctttcacattccctgaatgattccagcccacacaaacctctcctgaatagaccaatatatttattataatatttagtctataaatgacattatttagctcctttttcaattattttttttaactcagcatcacctagccccaaccattttcatcagtgcagtctcctcccttcaatcatgcagggtatctgggcctttcggctcttcagaagtacacattccataaaacttaaagttcattctgcttatcctactctcggtccttacatggctctctccaaaagacaattccagaatccccctgaggttgagtctttctattttggatgttcatgttgtctaaaggtacacagcaaacctcatcactgacatcatagagtgatgatatcagtgacatcgtgactcactgaacacctacctgtctccatctcacggcctgctggaccccagggcctggctgcacacttggcgtgcagcaggtattcagcaagcatctactaaagagtgaagatatcaatgtggctacaggcaaggagtactgtgctcaatgctctgttcacacaatcctggatcttgccccttcatgtctctaagaatcaacgataagaagaaggaagtcagatctgcagagacaccataaagtctatgtctagaatctaaatccctagaaagcctgccctatctggctccccagggagaaatcacttcatcccaagaagtaaaagaagtgaataaaaaaaaaaaaaaacagggttaagattccagatctaaggtagtgtcttagttactattctattgctctgagaaaataccgtgaccaagcaaagcatttaactggggaattgcttacagtttcagagggttggttcattatcatcacggcagagagtatgcagcatgcccatgggcaagcctggtgctagagaagaagatgggagctcacatctgatctgtaagttacagagagaagtagatgagagctcacatctgatctgtaagttacacagagagagactggtgagagcttttgaaacgtcaaagcccacctccaacaacacaacaaagtcccacctactccaacaaggacacacctcctaatccttcccaaacagttccactaactggggaccaagtactcaaatatatgagcctatcggagccattgtcactcaaaccaccccaaggagaaaagatggcccaggtgttaagaacacttaactgctcttgcagaggacctgagtttggctctcagcatccacacaacagcccacgacttcccataactccagttttgagatatctgataacctcttctggattccaagagcccctgcatgcacatggtgcacatagactcacacaaacaacatatacattaaataaattgttatttgttaaataaacaattttagaagtctaattccacaagagacaaaatatcttgtttttcttccatgggcagactctagatttagaatgtatatgtgacaagaaagcaaaagagagtggcagcagtaagaggtggacaccagcccagagcaaagaggcacaagtgagatagaggggtgcaatcaggaacacactataatgatgattgtgcaaaaatgcccgagcaagctccattattttgtatgctaagaaaattaattttaaaataaaataaacccccagttctgcactttgatgatattcttgtcatctttctgcgggggggggggggggatcccaatatcacagattgctgtatcacagtaaatatgattttatagggaaaatgtctcatgagcttgaaagcctgtaacacacgaatactaattaacattgataacaatattttataataactacatttaaacagccaaaagcaatttgaaacttaacctatgaaactctttactctaataaacaataagtaattgaataaccacttcagaaaaacaaaaaaaaaatcacaaacagacatcacagtcaaaacataccgctgtataattaaattaccaaataagaccttctaacatatcctcaggccccctccagtcttagcctgcaagtagccttactcttggctctgaagaactctggaggctgcattcttgagaggctctgccctcaagtgtgctctgcactcaaatgaagtgtgaccctttcccaccccagaagacagactgctttccacacctgtacagtataatatgaggccagcacatgtccactttggctgaagtggtcttggttgccatgcctacatcatcataaagggatttaagacgacatgcctgatgggggatgtccttctgtatgctgtgaatatatgtttctcttattggctgatgaataaagctgtttcggccaatgaacaggcaggatgtagccaggcaggaagtataggcagggctaccagacaaggagcaggcaggaaagagaaacacagaagtcatcagggggacgccatgtagccgctgaaggagtaacatgttgaagctttacgggtaagccacagcctcgtggcaatacatagtttaatagaaatgagttaataattaagagagagctagccagtaagaaacctgagccatcggccaaacagtttataattagtataagcctctgtatgtttatttgggactaaaccgctgtgggaccaggcagtacagaaattttatcaacacatgcctgggttactttttcctgttgtttcttaagatgagacatttgtttgggttcgggcttcaggtgattcagtccaatatggtgtggaaagtatagtggctggaatcactgagcctccatcagcaggagcatccagcaggaaatagacaacctggtcaggaagcaggccaagctgtcaccttctaaggctcaccccctgggacctccctccaccagctatacctctcactctagaggtcccaagacttcccaaaacaataccaccagctagagccaagtgatcaaacacatgaggctgtggggagcacttcacatttgctacaacttctaacctctcctggtgcctttgccatatagagtccatcatcagaaagaacatcctaggcatgttaggcctaactcccgagttcaaagaactatgcaaagtatgcctttccttcgctactaatgtggacactgagaatgtatttctctgctctgcctcgctccaacctgtgccctctaatgccctctactgtctcccagtaattaaacactggtagtatgtaagcctcacttagagggactttgtggatagaggttatgcgtggacctggaagaaactcagtttttcatgtccttcagacacatcccttggacaacctttgcttctcgctggtatttaccctttggccccactctagccagtgtggcacaatgaaataattatgcttctctccatttctcactcctggatgctgctactatgacccctccccctttccactctttcttgacaatattctgataaataagcaccctggtgggctgactcaaattgcatcaaagggagagtttctctgctggcacatggagaatttcagagccacacacaaaaaaaggcagaacaaggctcagagacatctgacgccaagggtttgctcacaggatccaagatcggcagtgggacccaacacacccggacactcccgaggccctggtggcagttttgcctccatccaccggcccgggtaggccgggtgctgtttccggttctggtttggtggccctgctcagagatatctgacaccaggggtctcctttccagatctgaactcagcagcgggatccaacacacctggacactgccgagggcccagtaaccatgccatctccatccacgagaagaggacagacatcagagtattggatctatttgcatctaccagaagggaaccttggtcccatacccaccaggagaggaagagactcttgctacacccaccagaataaaggatgagaagaggacaatgtaaaagcacatcaacaacagaaaacccaataagacaccaccggagactagggaccatacaccagcaagacatcaacatcacaatgcagatgaacaagaagagaatgaccttaaaaacatcttcaggaaaatgatagaggacctcaaagaagacatgagaaaatcccttaaagaaatggaagaaaaaactaaccaaaaaatataagatatcaacaaatctctcaaggaaacagttcaagacctaaaaactgaaataaagacaataaagaaagcacaatctgaggaaatgctagaaatagaaaagctgggtcaggaactacagttgtaagcataaccaacagaataaaagagatggaagagagattctgaggagttgaagacacactagcagaaatagaatcatcaaccaaagaaaatcttaagtcaaacaaatccctaacacaaaatatccaggaaatatgggataccgtgaaaagaccaaacctaagaataataggtatagaagaaggtgaagaaatccaactcaaaggcacagaaaacatattcaacaaaatcatagaagaaaatattcccaacctaaagaaagacatgtcaatgaaaatacaagaagcctacccaccacatagactgaaccaaaaaaaaggtctcctcgacacataataatcaaaacaccaaacatacagaaaaagggaaaatattaagagcagcaaaggaaaaaggtcaagtaacttataaaggcaaacctatcagatttacacctgacttttccatggaaactctgaaagccagaaggtcctggacagatattctacctacactaagggaccatggatgccagcccagactactatacccagcaaagctttcaatcaatatagatgaagaaaacaagatattccatgacaaaaccagattcaaataatacatatccaccaatccagccctacagaaagttctggaaggaaaattacaacccaaggaagttaactacaaccagaaaaatataagcaatagataatgccactttaccaacagccaaaaggaaaaagggatagaatcccacacataatttcgccaccatcaccaaatcaaaaacaaactagaatgaacaatcaatggtcattaatatccctcaacattaatggtcttaactcgcctataaaaagacacagattagcagaatggataagaagacagaatccatccttctgctgcatacaagaaacacacctcaacttcaaagacagatggtacctaagaattaaaggttggggaaagattttccaatcaaatggacccaagaaacaagcgggggtagcaattctaatatccaacaaattggactttaaactaaaatcaaaagagatgaaggaggtcacttcctactcatcacaggagaaatccatcaggaggaagtctcaattctgaacatttatgccccaaatacaaaggcatccacattcataaaagaaacattactaaaactcaaatcacacataaaaccacacacacttatagtgggagacttcaataccccactctcaccactggacaggaacaccagatagaaacttaacaaagaaacaaaggaactaatagaagttatggcccaattgggcttaagagacatctataaaacattccatccaaatacaaaacaatttaccttcttctcagcgccacatgaaaccttctctaaaatcgaccacatacttggcaacatagcaaacctcaacaggtacaaaaaaattgaaataaccccctgcatcttatcagaccatcacgctttaaagttagaattcaacaacaacacaaattgcagaaaatctacaaactcatggaaactaagtaacacccaattgcacaattcatgggtccaggaagaaataaaaaaagaaattaaagatttcctagaattcaataagaatgcagacacaacatacccaaacctatgggacactttgaaagcagtgctaagaggaaacttcatggcgctaagtgcccacatgaagaaacaggagaatgatcacactagagaattaacagcataactgaaagctttagaaaaaaagaagccaatataccccggaggagtagacaccaagaaataatcaaatgaagggctgaaatcaataaaatggaaactaggagaacaattcaaagaatcaatataacgaagagttggttcttcgagaaaatcaacaagatagacaaacctttatccaaacttaccaaacagcaaagagtgaacatgcaaattaataaaatagggaatgaaaaggggcacataacaacagacacagaggaaatccagagaatcatcaggtcatacttcgaaaacctatattgctcaaaattcgaaaatctaaaggaaatggacaattttctggacagatttcacttaccaaaattaaatcaagaacagataagcaacttaaatagacctataacccctaatgaattagaagcagtcatcagaagtctcccaaccaaaaaaaggccagggccagatggcgtcagtgcagaattctaccagaaattcaaggaagagctaacactaattctcctcaaagtattccacacaatagaagcagaagggtcattgccaaactttttatgaggcttcaataaacttgatacccaagccacacaaagacacaactaagaaagagaactacagaccaatatacctcatgaacattgatgcaaaatttttcaataaaatactggcaaatcgaatccaaggacacatcagagaaatcatccaccatgatcaagtaggcttcatcccagggatgcaaggatggttcaacatacgaaaatccatcgatgtaatccaccatataaacagactgaggaaaaaaaaaacacatgatcatctcactagatgctgaaaaagcctttgacaaaatccaacacccatttgtgataaaggtcttggagaaatcagggataacaggaacatacctcaacataatgaaagcaatatacagcaagccaacagccaacatcgaattaaatggagagaaacaatgcaattcctctaaaatcagggacatgacaacgctgtccactctctccatacctctgcaatattgtccttgaagttctagctagagcaataagacaataaaaggagatcaagggaatacaaatcggaaaggaagaagtcaaactctcactatttgcagatcatatgatagtctacataagtgacccgaaaaactctaccagggtactcctacagctgataaacatcttcagcaagattaactcaaaaaaatctgtagccctactatataccaatgacacactggtgtagaaagaaatcaaagaaacatcacaccttacaattgccacaaataacataaaataccttgggataacactaactaaaaaagtgaaatacctgtactggaagaattttgactctaaataaagaaattaaagaagataccagaacatggaaagatcttccatgctcttggataggcaggatcaacatagtaaaaatggcaatcttgccaaaagcaatctacagattcaatgcaatccccatcaaaatcccaacacaattcttgagtgaccttgaaagaacaattttcaactttatatggagaaacaaaagacacaggatagccaaaacatccctatacaataaaggaacttctggaggcatcaccatccctgacttcaagctctattacagagctataatcctgaaaacagcttggtattggcacaaaaatagacaggtagaccaatagaatagagttgaaaaccctgatattaacccacacacctacaaacacctgatttttgacaaacaatccaaatctatactctggaacaaagagaacatcttcaacaaaaggtgctggaaaaactggatgtggacatgtagaagactacagataggcccaagccttttgccctgcacaaaacttaagtcaaaatggatcaaagacctcaacataaacccagccacactaaccctattagaagacaaagtgggaaatacccttgaattaattggtacaggagactgcttcctgaacatcacaccagtagcacagacactgggatcaacaattgataaatggaacctcctgaaactcagaaacttctgtaaggcaaaggacacagtcagcaaaacaaaacagcagcccacagactgggaaaagatattcaccaaccccacatctgacaaagggctgatttccaaaatatacaaagaactcaagaagctagtctccaaaacaccaaacaatccaattaaaaagtggggaacagaactaaagagacaattctcaatagaggaatctaaaaaggctgaaagacacataagaaagtgttcaacatccttagccatgagggaaatgcaaatcaaaataactctgagataccattttactcctgtcagaatggccaaaatcaaaaacaccaatgacagagaggattatgctggagaggatgtggagaaaggggaacactcctccactgctggtgggagtgccaacatgtacagccactttggaaatcagtatggcgattcctcaagaaaatgggaatcagtctaccacaagatccagcaattccactcttaggcatagacccaaaagaagcacattcctacaacaaggacatctgttcaacgatgttcatagcagcactatttgtaatagccagaaactggaagcagcctagatgcccctcaacctaagaatggatagagaaaatgtggtacatttacacaatggagtactactcagcagaaaaaaacaatggaatcttgaaatttgcaggaaaatggatggaactagaagaaatcattctgagcgaggtaacccaatcacaaaaaaacaaacatgatatgtactcagtcatatgtggattttagacagagagtaaaagattaccagtctacaatccacactgccagagaagctaggaatactccctgagccaagacacacaggggtgggcctaccccctatccgaaaggatatgatagactctgatgacaccctatgcgaggcctcaccatccaggggaagcagaaaggaaatgtgataattaagattttagttgggggagggtggtaggagaggaggggaggaagaagggaactgggattgtcatgtaaaacaatcttgtttctaattcaaattttaaaaatctgggaaaaaaacaggggggcgcggaaaggcagagcaaagcaaaactgcctagaaccaagacacactggcaccccaaattcaggaagccatctgactgccagactcccctgccttccacttttgaataaaagtcagacagtggctggggaagtgttccctgctggtctgtcccctctcccaatacagggagcagaccaaggaatagacaacaacagcagtctgcctactgcagacacatgggcacagcacgctggaagatggcagagaccctcaaaagtctccaaatttgattctcagttctaccattagttctctgggtggccactaacgaactggataatctctaaaatgtggcatttttgtggcatacccccgcaggtgacatgatcaaatacagcattaggcaggcacagtggcacattcctttaatcttatggtaaattggggacaggaagaagttattgtaaagattattttgtctttatattctgactataagatacaatgacagcctggcggtgttggcacacacctttagtcccagcactcaggaggcagaggcaggcggatctctctaagttcgagaccagactggtctacaagagctagttccaggacagcctccaaagccacagagaaactctgtgtcaaaaaacaaacaaacaaaaaaagatacaatgacacagaaaaccactatacaatcatgttagtgtagaacaacatgaaatacaaatgaacaaaacccccaagtcacctacaactctattatccaaaagtagccagacttttagtcttatgggtaaaaacacagacacagacatatgtacatgtttgtgtgaaaatatttctatgtgttgtaccctgtttttattgcctgtcattgtatcagtgtcaagtttccaaaactgtaagtccttttagaaacattttgcatgaaattctgcataatgtttcatcataggcttttagcaagatcctgtgctataaatacagagtggagctactggtaacaatgtgttcattaaacagagcctggcgtgagcgtgtgccagcccatttcagggtttgctgcctcagtgacaaccctcaagcaaagttttcaacagatccaacagccacttcgctgaggcttctgtgaaatacaaaaggtaacatgctcttgtggtaaaaaaaaaaatctctctcttttgagattaaaatttatcttggtggttcattcaagtccttgaacagatggctgataaataaacttggttgtttacagtgtcatccagacacagcaggctagtgatatccaaattcagatttctccctactgtgccattcctgtgcagcacaagcctccagcaagacctgcatccatgtagatttcatctttctgtgcatcaggtaccaaccacacatgacaacacccacagtgaacaccctcactaagacaacatacaattcatcatacaaaaaacaacaacaaatgcaactgtggttatgtaaatctactgtggccaccttggtctctgacccacaaccctctgtggtgtcagacccaggcaaagttgaagcagaagacagaagaagaacacagtactcgctgggcaatggatgctgcattggtggtagaaggtggcttggacaacccttcaagcctcgaatagttcacacccctcccatgggatgtggcagccctaccctcctgcaagcttctctgtctcttgactcttaattttccactttcttgttgttgttctcaaacctcttctcttggcttttggttcctcccatcacaccccaaggaatccatcttctcttaattggttgtatgttgggaccacagagtgtccaacacactcaaagtacttcatggactcatatttacacatcccacagataatgtggccacagggttctcaattacagatctctgatgctcatgaagaaaacatgaaagtttttggttcatgtaactaacaagctcaggggtgtcatcgcctccagagcttggatgagccaccctgcttcacctcctcccatccccggccccatttccatttctcttggctaaatgtaggcaaatgcttccactgtagcgctctctctctctctctctctctctctctctctctctctctctctccctctctctctctctctgtcactctctctctctgtctctctctctgtctgtctctctctctctctctctctctctctctctctctctctctctctctctctctcacacacacacacacacacacacacagggaaggaagttccagtgaccctaacctcatgtatcaccacatcaatatcatagagaacaaggcttttctctcccagagggtttcagtccttcaggaaccagaatcccatgacatagatccttggcttgggttgtttgcctgctgtgaactggcccctgcgcctgagagaaaggcctcatcgcagagtctgagcccagtcagtgagaagctgtttcctcaaatgataatgagggtgctgtttcagaagaggaagatgctgactggcaaagggtaaaataacaataatgcccgacaatccgcatttcagtgtctcatgtcccatctgcatgcccccttctttctgcccacacgatctcggtgctctccccacaccatataacacacacacacacacacacacacacacacacttctcagagtctgctcctttcctcctcagctacaggtagcccagaatgatgttttcttttatacccagttccaggatgcgggccctctcaatgagcccaaatatagcacttcatagttggacagcctataaactaaatgacgacagtgagcatcccaacacacctggcacacaagagtgagcagacgggctggagagatggctcagaggttaagagctctggtttgtaacatgatgttttctggcctggctgggtcccgctgcccttctctgccccaaagaaacacgcagacactatattatttataaagctgttggccactggctatagcttcttattggctagctctctctcttaattattaacccatctctatatttctaagtatttccacgtggtcttcccttaccagagaaaggttccagggaattgttactcctctggcatccaacatgtcggctgctcagcatgtcggcagagaagagaagaggagagatttcctgtttgtccttgcttatattctgcttctgcccagctacgacacttcctgcctggccaatcagtcaatcagtgttttattcattaaccaatatgagaaacatatacacagaaggacttcccccatcactggttgctcttccaggggtcctgagttcaattcccagcaaccatatggtggctcacaaccatctataagatctggtgcccccttctggcctgcagggatacatgcaggcagaacgctgtatacataataaataaatctttaaaaagggggggagggagagtgagaagaagacagagcaataccatagcactggctgtggggcccaagatggcaatgatttaactaactgttttcttcttggtccaggatggaactccttgtttgtcacccaagcgtgagtcaccaaattcccattttagaatctgttacttacaacattaacctacttgtttctggttcttagcaggaggtaaaggtgctgcagctgccaccctgtcccactgcagaccacggacccaactggcgtaagtctgtcgccgctgcctgcagggctccaggaatttcctctggtcccagtttcccatgtgctcttggttctttgctttttgctgctttcatttggccatttattcattcaggtaggcaaactagtgcaccagagctccatgctggcctgtcatctcctcacgcaccatggggtaagcagaacttattcccatatttcaaacaggaaccctgaaattgacctcatgggtctgactcaggtcatttgcccacctgggaaaggaaccactttgggttcctttccgtacccaaaggaacggaagagtctccttctgaataaggcatgacaggtggttaggaagacaccaaggatgttctcaacaatcagatggcttagaagcatctcaaagatttgcactccattccttctgccctgccttccaactccccaagactcctgatagaatctcactttcgtgtgcttagcggtttacccagtatcattatgagtccttacttatgtcaaccagtcataaatcacaccttcccattctccagattacttaattgggagatttgtaacagattccagtcaattggatggaggagaaatgggcggggggggggttgattttctttactaaaaggaagaaatgtgtccaaagcctgtgtactgtcctagacacctctgaactcactcccggttactgcctctggcttagatgtgtgaggataaaaggttcgagctgtcacagccattttatgaacagtgtggggaaagccgtgatgagtacaaaactgtagcttagaaaatgacaaaacgaagcaaccgaagcagctctacagccactacccctgcttgtttgcataacactctagacaaggcccctggggttctgcttcgtgtatctggacgcagcctccctcctctacagccattctccataaacactcttctctcaaggcagagcagcgacagtcggcactctgtccatcctcctttgccaaggcaaaaccgcctgaccctttcccatcccacaagcctaagaaaggacacaagcctggatgttcttcctgtcccagactctgtcacccttttccttcacattggattgggttgaccttataattacagaagctgagaatccccacaagctgctgcctgcagttaggtaaccagaggagctgtggtgtgggtcactcccaatctgaatccccaagggctaggagagacgatggtcagagctgactctgccatggagctccccacagacagcctgtgaattcatttcttgggtgaacaaatcttgcacccccaagtaccgatgatgaacaacttcagctctccagtctgcaagccacagtggagatccggaataatgctgactggcccatcctcagagaaataaccaaccatgcttttctctgaacctccctccccaaacccatggcccaggctgatcttcactgggttctcaatgatatcattgcaatttttatccacagcaaagattggttgagcagttatatactttcccttagagaaaatgttctgaagacaaagctcggaatgtcagtctacaggggtgaataaaccttgtgggacaagccaagccctgggccacccacacaagcactgcacattctgtgcagaggtgtcctggtttatgagacagtcaacccaaagctcccagagccaacgccccatggacagcctttctctgagagccacatagcagctcacctcctctccgtagcagctcgtgtctgcagggctcagggaggttccgcccacacaccagtctccatcaggtcaggaaagcagactggactgggatgagggcggcacaagagactacaaaacagagaaagcaaagaacctgccgtcagaacagcctggccatcactgcctgcagctgctcatctccaggaggacctctgaaacatccctacaccactgcaaattattcctcattccctaaacacggagaaagaagcagggcttgagggcagggagtgtaccactctgttttacaccaacgactcctgaaaaaaatgagacaaggcccagggaggtctcgagatggcacagcctggagatctggcagggaaggtacagtggcagagggtaggaaaacgtactgcaaagtttgcagtctgcccccatctgctctgtgctgttccatccgtggcaggcactgaacagctcatctgctcttgccaaacagacccacatggagaccaggctgtctggaaaagtctatagacagaaggagggccaggtctcactgtctggggtctcacagaactggcacagtccaacccaagggcagaatgtccattgccctgcatgctagctcttttatgctgagatctcaggattccaatctctagtactgtgttcagtccacctatgtgaccaaatgtagttaaatatgaagtcagaaaggtaaactgaggctagactgtgaagggccttgtatgccaagccaaaatgcttaggatgtatctctccatctgtggcctctgattttatggttgtaaaacttcatccggaagcataggaagaaaacattaagatttctgtatttctctgcaactaaatgcataacaaattagacagttcagtctagggacttccaggctgagatgcagattagaagccgctcccatgtgctgcagtgaacatgggttgttcctatgcaagtctggaagagcatgggaaatcacaaaggagatggtaagacagctggaaaagtgcggacggaaggggtgaggcaggagcgggcatcgtcagcccatgccacggctccccagaggggaaaaggttagctccctggtgaacagagactggcagtcctacacactggacaaagtcacagttctcacaaacctctaaggccaccacgaagggattcggggagatggtgataccacctgtgtgtgattggtcagcacttacaaggtttccactcccaatgtctcagagggctgcaactggagaacatcttggggcagggcggggtggggaggggtgggggggcggaggctattgtttaacactgtgttactctgaggacctgattgtgagatctaatccatcacaagctgtaggaacgaactgacatggcctgtgtgtgggagagcgctgcagggcagttgtggagaggtaggctggatgcaaacctgccaagaagttcagggagtaggagacgtgttcggtggtcagaagcctcaccctttgtggttgggtaactgtggctgctgtctgataagccaagcacaagcgtggcaggtaatctaaccttggaggtgctgcctactgtttgctcacttccaactagactgagagcaatgaaactcccccagagtgcctgacttctacagcctccttcttcccatggatgcctaatgatgcctggggtggggaagctcttgccgttagtccttctgtacagacctcagcactttcatttccccagtcatcaaagcactcagagactccccttggctaggaccactagccaccctgggacatatgaacccagagaacccaccttccagtaggtcaaagctaatgtggccagaggaggctcctggcatgaaaacaatggaagtccctagaggaaagacagcccttaaggacacttaaccaagccaggctaagcaccaacccaaatggtaggagtgacaagagacctcgacttcaaatgagccccactccccatctccaccaggcagactccaatattagaagacccaggaagatacattgtctcatttttattttcctgggttgttgtttgtttgtttgtttaccttttgtgctttcccctccccctttagtatacttttgttatttttatttgctttttaaacacactttgcttttagtcttcttaaattttatctaatgtttgtgctagctctgtcttaataattagcccatttttaacaatctatgtattgctacaagggtacccgataatgtccggcatggggttactgcccctctctctctctctctctctctctctctctctctgtgtgtgtgtgtgtgtgtgtgtgtgtgtgtgtgtgtgtgtgtgtgtgtgtgtgtgttcttcccttctctttctgcctctctctctgcttttcccttctctctctccctgccccctctgtctctgctccccccacccagcgtatgtgtgtgtactgcaggttgaactcgggagccttacatttgctggacaagaactgtagaactcagctatttccacagagctttcttttgttgttgttactgttttgttttggtttttgcagtcagggtttctctgtgtaacagcccaggctgtcctggaacttgctttatagaccaggctgtagtcgaattcacagagatccaccggcctctgccttccaagtgctgggattaaaggcctgtgccaccactgctaggctccacagaggaggtagtcctgtaactttctttgttttggtttgttttggtttggttttttttgttttggggggtttgtttttgttttttgtttgtttggggttttttgggttttttgtttgtttttttgttttgttttgttttgtttttggctttttgagacagggtttctctgtgtagctttgtatatcatgctgacctcaaactcacagagattcacctgcctctgcctcccaagtgttaggattaaaggcatgtgccaccacctcctggcttaggcctgtaactttcaaacttcttgttttagcctcccaagtaagtaggaataacggccggccgagccactaaaccaagctagcaaatcttaacaaatacagaagactcaacatttttttctttacttttgttttttgagacagggtctcactgtgtagcttgaccggcctgaaactcactacatagatcaggctgtcctctgccgattaagcctccaaagtgtgagacaaaaggcatggccaccaagcttgacaaaattatttcttgtatcttgtcagatcatagtgggctaaaactaatagcaaaagaaactatataaatacataatgtgatggctaatgttagctgtcaacttgagtggctctgggatcaataccacttagctattgagcattcctataagagatctgggatcaatacaacataacatattgggcactcctatgagagactttctcgatcatgttatttaaagtgggaagacccaatatatgcatgggtattaatttctgttgtcagcccagctaaaagaacacagaagaaagaaacttgttctctgtctgcttgcttccactcttgatggcaagttcatctatctggtcgctgtgtcagtcactgttccctcactgacattagaaacagcttgtttgggcttgcaacatagactcaaacccagcagctctccaggaaacctagaggtttcagtttgagactaggactactgagacatccagccttgtgcgctgagcaactactaaattctcagcttctccaggatgagacagtcatgacttgtctacccagatcatcctgtataagccaatctaataaatctctttttaatacaaattcatgctgttggttctgttcctctagagagccctggccaatgcacatataagtggaacaaagactcttaaatgatcactggatcattgaaggaatcggggaggaaattaaaaattcccagaaccagatggaaatgaaagtgtaacttagaacatctgaggcaaagcaaaggcaaatgtaggaagaggattcactgctgtgaatactaatgttaaaaaaaatcagaggaaatgcaaataaataaccgactgatgcacctcaaggtcttagaaaaacaagaatgagtcaaacccaaactcagtggatgtaaagaaataataaagaccagggcaaaaatcagttaagtggaaactaaaataataatgcaaagcatcaaaataagacaaaataggtaattctttgtgaagacacacaagattaacaaagtcttagccatactaacaaaataaaggagagaaaacccaatttggtaaattagggattgtattacaatgaataccattgaaatccagaggatcactagagagtatgtttaaaaccatggacgaagatccagaagaaacaggtcagttcctctatacatcatgacctaccaaaagtagatcaagaggactttaacaacctaagacctccagagagcaacaagactgaatttgcaataaacagtcccagcaaagaaaagcccagatcacatgagcttgtcgccaaattagatagaaaggataggaacaacaccaaacctatctcacagagtcaatattgccctgaactaaaactggctaaggatatacaaaaaaaagaaaaaagaaagaaagaaaactacaaaccaattaccatgatgaacacagacataaataatcaatgaaatactgacaaaatgaattcagctatgtattaaaaagatcacacacatggtcaaggtggtttcactttaggaatgcatttcagttcatacacaatcaataaatgtagtctagcacaaaaatagactcaagtgcagaaatcacaaaatcatctcaataaacacagaaaaggttcttgacaaagttcattatcacttcatgacagaaactggggatacgaagaacattcctccacatagtaaggctatatgccagaaaactacagccaaattatactaagtgggggaaattctaaagcagctcttcttgtttataagcctccttttctggattaaggagctctcactgctcatcaagaaaacttctctttgcagcagatagagaccatctcagaaagccactactggtcaaaatacagagaacagctcatcacagggtgtgcagccccagcaggtatgcctacaacacaacacagctaactcctcctacacctaaggctcaaggaacatcaaggaagagggagcagaaagactgtaagacccagaggagccaggaatctgcttgtgtctcctagaagtgacagggaagctatgcccatgacactataacaatatggtcacctaaacaagatccaaacaatgacaacagtaatagacatgttaccatggaaggaggaaacctcaagaggccacccttaaataaaaactacaggcaactaatgaccactgagagagtctttcccagggacaagttcctaatatataacaatgattaagacaaagaggacacggacttaaaaggaggtcagaggcacgtgagagaaactaaaaagagaggacgtgaaagtagctggagggaagaaagggtaaatgatgtaattctattttagttaaaacctttaaaaatattaaagaaataaaactatttcttttaaaaccaggaatgaggctggtgttggtggtgcacgcctttaatcccagcactcgggaggcagaggcagtcggatctctgtgagttcgaggccagcctggtctacagagcaagtgccaagataggctccaaagctacacagagaaactctgtttcggaaaaaaaaaaaataaaaccaggaatgagacaatgtgtccaccctttccaattttatattgcttgaagtcttagctatactggcaaggtaacagaggaaaaaaaagaatacaaataagagaggtcaaattatcttttaaatgatatactcctacacttaaaaatccctaaacattctaccaggaaactcatagatctgataaacactttcaggaaagttccaggacaacagcaaccaaaaaaaaatcagcgtgaaaaattcagtaggttttctaaaaaccaataatgaaccttctaggaaagaaatcaggaaaaaaatcacattcactacaccttcaaagacaaacaatctaggaataaacctaatcaaggaggttaaagaactctacaatgaaaactttaaaactctaggggaaaaaaatcaagaaggcagcagacaatgggaagaccttccaaagcttgtaaattggcagagttaatattttgaaaatggatatattatcaaaggcaactacagattctatgcactctccatcaaatttctaatgacagtcttcacagaactggcaaaaacaatcttcaaatccacacggccaggagaggctctaaagctatacagagaaaccctgtctcaaacaaacaaaaaaaatccacacagaagtactgaagaccctaaagagccaaagcaattccaaagagaaagagtataggaaacaatgtataaagagcaacctgatttcaaatcatatctcaaagcatagaatcaaaatagcatggtattgctacaaaaatagacaggtaaccgatgaaatagcatagcaggcccagaaataaacccaccttacttccaataaaggtcccaaagaaaaagaaaaaagacctcctctgtaacagctgtaacaaatgccctgggaaaactgggtatctatgcatagaaaaatgaaaatagattcttatcactcaccccataaaaaagtcatttcaaaatggatcaacaacttcatgtaagacctgaaactaagaaactgctgcagaaaaatggggaaaacgtcgaagatgcaggcatagctatgcatgtacttcctaagagatgtcccaatagcacaagaatgacaaatggggtttctcaaaatcccaaagcttcgttaggggctggagagatggctctggggataagaacacacactgctcttgcagaagacccaggttctatccacagcacccacaggcagctcacaactgcctatagctccagttccaggaaagccgatgtctcttcagacctctgcaggctcctgaatgcacatggggcagagacatatactcaggcacacatatacacataaaataaagttatttaaaaatcttttgtagcaaaggaaatggttaatcaaataaaaatagagctacagaatgggagaaaatcataaatagggttcctgtgataaacaccataaccaaaagcaatttatgggagaaaggattcattttatcttacaactctcaggccacactccgtcactgagggcattcaaggcaggaactcaggacaggaacgtggaggcaggacctaaagcagatgttatggagaaatgctgcttactggcttgctccccatggcattacacaacccaagaccacctgcccaggggtggcaccacccatagagggctgggccctcccacatcaatcaattgtctacaattatggaggtattgtctcaattaaggttccttcctctaagacaactctagctaatgtcaagttgacaaaaaactagccaacacagtatcttaaagagaattaatatctataacatataaataccaagaaacagaccaaacaataaatggaatcatgaaataaataatatagttctcaaaagataagtacaaatgggtaataaatatattttaaaatgttcagcatccttagatatcaagaaaatgcattatcagagccagcaagatggctcagtggataaagtgtttgccatacatgccttgactatctgagtttaatccccaaaaccttttagatgtggaaggagacagcaactccacaaagttctttaacctacacgtgcgcacgcacatacacagacacacacacacacacacacacattcatacacaaacattcatacacatgaatatactgaaagatccctagtgactcaggcccccaggatttctgcccaggacctcggccaccccaatcaccaggcagaggcgaaagcttgatgcaaacagcaagaggccttatttgcagttgtttaatgagctaaccccataagctcgggcctttcatccatccaccatggcagatagctggggaacgaccccaagaaaccacgggacagaattttatagggcagcataagggcagtgtctaggggtacgcacaggttcaggattggtgtgcctccaggcttggagggcttgccctgtgttgattggtcaactggttgttatggcccataggccctcccagggcggttgctatgttctgtatgtctctggctatgcacttgtcggtaaagcacacccagagccataaagcatagcaccaccagctaacttctgattggttccttgccacgagccaggcatctgacctcctagtgaccagggcaaggtcaggcaagcacgtgataggctgttatggctgccgaaatgggggagctggtcccttcaacacatacacacacacgtatacatatatactcacacacacatgaacatacattcacacacaacatacctgaacatacaaacacactcatacacacacacacacacacacacacacacacacacacacacacaaatacatacatactcatatacacacatgcatttacatacacacacaacataaaagcagaaaaaagactatgtgggggtgcttatgcgaccagtgagagggagaaggctggcaaaagagcagtggggtgaatattaacagtacaatgacatacacatgtgaaaatgccataatgaaacccattgcttttggttttgtttgtttgttttgagacagcgtttctctgtgtaacagtcctgactgtcctggaactcgatttgtagactaggctgtcctcaaactcactgagatccacctgcctctgtctcccaagagctgggattaaaggcatgtgccaccaccaccaggcgaaatcctttgctttataaaattactaaaaaaaaaaaaaaaaaaaaaaaaaaaattctggaaacatatcccactatgtattcctggatggcctagaacttgctctgtagaccatgctggcctcaaactcacagagatccacctgcctctacctcccaagtgctagaattaaaggcagtgtcactatacccaacaaactaaaaaattttaataataaaacatttaaaccaaaagcgagaacagttctctatagacaatggtcttcaaggcttcccttggtaccaccatcatccttcacaaatcatcaggatcttgggggaccttggggaaagtaattatttaaaaataacatgccagcctcaccccctgcttttctctccagtgagaaacgaccctcacagacaacacaactgggtggatctacacaagatctagttcttaaacatctcaatatgtgcaaaaagtagaaatgttttcctctttaagaaaaaaacaaaatcttggctgaagtagtaattacatgaacaagacaaatgagaggaagagagctgtgagtctcccatcagtcacatcacaaaggacaacaatgacaagtactcaggtctcacaagttaaccaaaaagtatgtaaattaccaaggccgcttgaaatatagctttgcatattgagaatgagaaatgtaatcctaagtataaatcctccttgagacattagctaatgacagtaatgaaacaagatactataaagcaccacttacattatctttaccattttaaaattgatacttacacatgtttataatgagcttaacatattggtgctataatgaaggaacaaaatcgccctaaatgcacacatacgtgtcaggaggtcacactcagcgctgcttgctgctgacagtgggggagagaaggggcttggagccacttttcggaagcactcaatgagtctcagcccagccctcccattcttgccagggacctttttgttcgcatcttcagcaacaggaagaaaatcatttaaaataggagcttgcaaagcaaccttaaacaaaaacaatacagctagaggaatcctatggcctggatttaaaacgtattcctaaactacagtaatctgaacagcctgatattggtatgcagacacactgtctaatgggatgtaagggaggacccagaaataaagcacacagggcgaaatgatttctaacaaagagcccagacacacccttagcaacaacacatttgaataaaggatactaggatgggactaggcccctgcatagaaaaatctaatcaataggctgtgggtgtagctcagtggtaaaatgcttgcctaacatgtgcaaaaccctgggttcaacctccttgcataataaaaactcaaaatggtgtcaaggcttaaatataaaagcccccaaatcataaaaccaattaaaaacatatgacaaatgccctatgtcagtagtctgggcaagtgttcttgttaagaaggaaaataaaagtgcaggcaacaaaaccaaagtagacaaatgggatgacatcatcacaaggaaagcgtctgcacagcaaagagacaatgggcagggtgaacaggcaacttccagctggcaaggggttaacactggaacgtgcaaagattcaaaaacaataacaaataatgatcaatcaacagaaatgggctcaagagctgggaatataactctttggtacagtgcttgcctatcaagcacaggccctgggttcaatccctaccactgtcagatgatagatagatagatagatagatagatagatagatagatagatagatagatagatagatagatagataattatctgaatggacagttctcaaggaaaatatgcaaatagaaatacaaattgagatgggtagtggcggtacatgcctttaatcccagctcttgggaggcagaggcaggcagatctctgtgagttgagtccagcctggtctacagaacgagttccaggacaggctccaaagccacagagaaaccctgtctcgaaaattttaaaaaaataaaaaatagaagtaccacatggtccagcattaccactataggatttatagccaagggatatgaattgttataaagaaatacctgtaggctagagagatagctcagaggttaagagcactggctattcttccatatgtcctgagttcaattccaagcaaccacaaggtgtctcacaaccatttattatgagacctggtgccctcttctggcatgtaggcattggtgcagacagaacactctacataataaatcttttttaaaaaagaaagaaagacctgcattactgtgtttactgaaactttattcacaatagcaaaggtatggagtcaactgaattgtttactaacaaatgaatgaacacatgcacacatttgcacacacacacacacacacacacacacacacacacacacacacacacacacgggataggataactatccagctgtaaaaagaaatgtaatctcgtcatctgccaacacagatggacctggagatcacaacattcagcgagctaagccaagtatgaaatggtaaatactgaactttccacagctctaaaaggctgagctcgtggaagaagaaaatagagtagtgaaggaacccaggctggaggcaaggggtataaaaggagactggctagtgaatacaaagtctcagccccatagcagaaaaaggttctggtatccaattacataggccaggatagcagtattctattgtagcattcaaagtaaccagaaggtattttgaatttctcatcacaaaaaaaaaaatggcatcataagaaacataaatatcctgagagatcaaatgatcaccataaagagatatagttgttatctatccaaacagttgctgccaacattgcagaaagtctggccacttcagaactctatcaaagatctgctagtttaactggactttgatccggttggagtcataaggacctcagccaaatctcagctccgactcacggaaatatgggggaactcaagataagtcagtcctccggcctctgcccagcttgtggaaagtaaagcgatagaaagcaattgggggaagggagtgcatttctatgttgatgttaattctttctttaaatatttgtttaaattgtgtgtaaagagagttaggcatgtacacatgagtgcaggtgcctgtgacgatccaaggattcagataaccccgcagctggagttacaggcagctgtgagctccctttgtgggtaccgggtcctttgcaagagctctaaagtctttaaccggccgttaaagctgagtcatctcttcagccccaatgctaattctttatcttaatatatgtttttcagtctcatttgggatagggcttcttaatgtaacttttgcaagcctgggtgttaaaatattaagaaaatgtaatatggttggaaagtagatttgtgtgtcaactcctggggagatgtaatgggaacgtgtttggctaaggacagcctggactagatggcccttattgctcagggccaaaactacacagctattgccagcttgttcaccaatgaaaacattgcaaagcctttgaaacaactgccgggcttggagaagtacggctcggttctggtgcgtcatccccggggtcctgggctctggccctgccttaagaactaatagagctctaagatgtcccgataactctgtccgtatggtgaaggcctctgcgactctgcggaggcgaggcctgggcaagagagctgtttgtcgcttgcacaaagtgtgctctctgctgtgcctctgtgggaatctacgagaagtccagagatcccaaagtaaaaggggtgcctcgggacccaggcactgccaggcgtgtccgcgggccaaactgtgcgggtttggcgccccctactgtcccttgccagagacagagatctgcttcctggaggctcactgccggaggctgctaaattaaacaggacccagaaaggcacctgccccctcaacagtagaatccaagaatgcaaagggaactgtgtggctctgagtctctcctcccatgctcacctgaaacttgaaaaggagcaggacctgggaggaagacccaaaccttctcatggcagccacgcctctcaggacaccccagtgttctggggatgtccccagagcagaattagcttcagcgccaaacctaggtgagcctgaagggaggcatccacacattccttaggaaacaaccactcagctttatagtgacctggggactccaggaatggtaccaagggatgcaagctacagactgggtcccttttctccgggaactttccttatagaaaaaaaagagagagagagagaaatgctaccacttgtagagcccagtaatctgctattatctccgagaggaacaataatgttttcagcccaaagcagactcagtaaagatggagagacctgggctcacagagaccagagaacacagttaaaagcagaagcccccccgtccctgatcctggctaactgactccaatcccacactgtccactggcgccatcctattatacacaaggaaggtggacatagaggacacatatctatgacaggggtcaccctgagggcgagaggttggtgagtggaccagatggagagcagggtggagaggaatgggaaagggcaaatgttttatctctcttcttttaaaaataaataaagggtcagggctgaagaaatagctcagcctttaagagtgcttgctgtccgttcagaaggtcagagttggcttctctcacagcctctgtacctccacacactcttctagcctctgcaggcaccagcacacacacacacacacacacacacacacactaaaaaaaaaactgaaatttaattgtaaaaagaattagtttttagggggttagagaaatggctcagcagttaagagcactgggtgttcttccagaggtcccgagttcaattcccagcaactacatggtggctcacaaccattgtttgtgagatctgatgccttcttctggcataaaggacgaccatgcagacagaggactcatacacgtaaagtaaataaatcttttttaaaaaatgttttttaagtccaaatacactggtggaatcttttaagagccaggggtacagcctttgcccaggagatacacagccctgagcttaatctacaactccctccctccctctccccgaatctcccttctctaaaattctagtgaaaagttaattgtgaaagtagtgatatttgttcattttggaggttgaaaggtaacatgactgctcattattttattctctgtgtgtctctatgtcttaaatttttcctaaatgatagttccagagaagaaactgggagaagatgagaatcttcatgtggcatcgttgacaccatcacacccactcagccatcacagagtttcactggcccaggcctcactgaacaagcaacccttagctctggtctaggaacttctgagcgcctcctgtcacctcttaaaagatgagtgagcgctttacagatctgcaaagaaagtgcctagtctgacctcacaccaggagagctgcaggctgaggtgagaatgcagctcagagtctgacgggtaccagcccaagcaaagccaaggtggcatttcccaaggtgtaagccgaggcggcatctccccgcgtgtgtgctgggctgtaccggcttcaggatgcagtgtggtgagagatcagcatccccagccactcattatctgaaaatgtctccttccacagataaatggaacaaccatgtcctctggccttttattttacatgcccagccaggcctacgaaaatgctgggttctcaggatgagaacggaaagagaagaacatgtttttgcatgagaccattgctggggatttgtggggagtcaggtccaagaccccctagtccagagtcccacaagtgtctgtgagctctggttgcgcaatcccagaagccaaacttactgcatctcttatctccccacctgtgacttcaaggccaaggactaagttctgattgccctctctcaccttggttctcagtctcccatccacagctcctgacaaccctaattttattatatccccaatgaaacactgttcccttcctgccccacccactcctctctgccccaacccccatggctggggataaagtctaagatcttttgcatgtggcaagaggtcactggttcagacatacccctcctctctctgccttagtctgttttctgttgctaataactcgatagcacaggctgggcaagttacaaaggaaagaggttaactttgccagttggttggttcaaagttaaaggccacatctggtgatagctcacttgctacatggttgagaggaggcaggggcatccataggagacggttgtgcatctggggaacctagcaactcactaacctgttcattgcatgtgttgattactttactccagaagtccctgcttcatgctacttcctaatgccttttggattttatggagaaggaaccacattcaaactatgcttcatgggcaattcctggtgcaacatctgcagacagctgaaaggttatgataaagagaaggtcccaaagtttaaaaaaaaaggggggaccccagaaatgaaatggggaaagccagacacaaaaacccagagtcagcccaggagctgacttctttgtgtttactgggctaagggcatcagggttccagagaaacctccaccgtctctggtcccttgcatagcctgggtgggcttgcatggccactgaggaggaaaggagacatcagtatggctccttgggctgggtgcaccccagcaggccaagtcaagacactgcttcaatccagggtgaaggagcagcaaaatcggagcaggctgtggtggtgacaggccgggcacagtaagagcagctcactgccctatattagcagatcttatggcaacagcttcaccgcggatccaagtggagttaaaggaggatccctctggccactgttgagacagaaagactactcggaagagaacaagaaggggagctgcgggagccttgctgtgggcagaaaggataacagagggagcgcgcgtggaagtcaggactgagtctcaggtaggaagaacaggacagtcaggaggagggctgcccatgaccaacagtcccggggcttttgtttgccatgaagtctactcaacagtaaacagtacagaatccttcctccatgacagcacattttgtccccatctttttctctaatgactgattccactaataaactgtaagttattccacagtaagaacctaattgatatccaggttttacatgcttgtaatcttagcagaaatgtcagttagaggccagcctggtctacatagcaagctccaggcaagccaggattacataaggagaccccatctgataaacaaacaaaaataccagatttttaataaataaggccccattggctacaatacataaacatatatgatttggctaaacatagatgacaatggaagaaattgagccatgttctggaggacactggaggcaaggtatacttgctgctatgactaatagggaactattgaaggtttgcagaaaaaaataaatcttatcagagctatgcttaggaaaactaaaccggctacaatggttgagtggatggggagaggatctggaaataagattagtaagtaatagcaaaaattccattataaagggtcctggtacataatattatggcccgtggctctattctacagcctggacccttaatttaaaaatgtacctcagaagcagggcaaggtagtgcatgccttcattcccagcacaggggaggcagaggcaggcagatctctgtgggtttgaggccagcctggtctacatagagttctaatcaagctgggtctacacagggaaaccctagctcaaaggaaaaagaaaacagaaaaatacttaggaattccggttaagacacatgcaaacacagcacaaaaatcccactgtgccagctcaaatgctttcatcttcactaggaaagctcagtcttgtaaatgccaagaacactggactctgccaggttatgagtttggagagactcacatctggctttaatgaccatcatcggaaaaaacaacatgtctgcagaatcaagagaaaggtttctctgcttgacggagagaggatgtgttccgtctccagcatggacgttctggtcaataaacttcctggttgccaagcacacacttcaggcctggcttcacaaaggacctgagaaggggactgctggctgtgccagagggccctcttctggtagtcaggggatagatagactttgctttaagggagaaaggcctataaaacaaggaggcaccctggatctgcagacatgcttcacccctggcgggcagcatccatctcactgtagaatataaataaacaacattcctgagcagggactggttctggctcaggtcgccacagtgtcatgcagatagtagtaatacttctgagtgggaatacttacagaatcggcctaatgagaaatcataactcattttttgttcttttgtttagtgttggtttgggtttgtttagaaatagagcctcactatgaggcccaggctagctttgaactcacaaccctcctacctcagcttcctagagtgctggcattacaggtgtatataagtataaggcatagataaataaattggtctccctcagtgataattctattgagtttctgcagctcagcaggacctgccatagcatcagaagacagcagggatgcctttttacagctgtcctgttaacagaacagggatgagggtaaatttctgggattaagggttgtggaagtagctccataaaaaatgtgcttactgcccaatcatgaggacctgagttcagatctccactacccgtgtgaaaagccaggcctagtgctgtgcatctgtgatcctggcactgtagctcactgtaggtcaagccagtctagctgaaacaatgtgctttgggttcagtgagagaccctgctgggttcagtgagagaccctgtctcaaaaataaggtgaagagcacagggtcagcccacttggtcctgcaaacctgaaggaatggcatgggaagaaagaaatgacagaaaagctagctagaatctgtgtgcactgtgcttactctgaaattgggtacccactctgtcacaacccggaaactcaaggaaaggttagctagtcttggtgggaggtctctgtaggggaaagtctcagactgcagtcaccagggaggagaaagctgtgaaggatgctagctcctcccacccccaatacactgtcagcacacacacacacacacacacacacacacacacacacacacacacacacacacaattcccttgggtctgaggcactggggtctttggcatggccatgcacaggacaacaatatctattcactcaagacttcatctggtccccacaggagagcaagacattcaataccaatctctgggctgcacaagcagcacctaatgtcatgatatattgatatatgtaatacatatcaaagaagttattatggcctaggcaccattttagtggcctcataaatattattcggtgttcatggcaagtccccactgatactcataccaccctcccttgcaattgagaagactggagcacagacagggtgcttgatttgcccaaggtcattgtcatcaagtgacagactcgagatttgcacttaatctgtctagcttcatagacatgtgtgttctgggttgttatgccaattctctgtttgacctggtggcagcatatttgcttgttatatttttgatgcctggtacttcccttgtttatgcaaaagaggactccctgtttagataatgagccacgtgagatttcaattgtgatcatttttctcgctggtctactgatgggcataatctgactgttgaacccctataagagttcaatatagaaaaggattttaccttcgtgaaaacaaccaagttcatttgctaagggtggcagctggactccggctgctgattttcctctggtcttgggtctcctgaaaggattaatcagagctaatcaggaacaatgctctcttcattctccttccattctgcacctgcaagtgctccacaggaccacaatagcactaaacccccattccccgggacagcagagctgacaactctattgctggagccaagagggatcacagagcagaggcccagctgctggcagagcaagggctggctgaatggggacaaacagggatggtgctgcttcctcgctgcctgaagtcttgaacacagaagtgtgagtgagtgtacaagtgagcacacacgtttaccgtcagaggagcgtggctcctgtctgaggctggcagcacttcagatatggtttacttatacttcattgtatggtttccttcagcatcagctgcctttgctataaaggaattccatccccaaagactcaccagccctgaaagactcattcccaaaacatcacgattctgtaatcaatagtccttaaactagaggaaacggcctgtgggcctttaccacacacttcttgggagtaaaggggagtggactttgtaagtaacaagtggtactaaaccataaggccaatcatttcaggagaaatggccagacttctagtgccatagttcacaggatcaagagcctacggttaaagccttggcctcttcaaagtgctttgtacctgcagactttttaaaaaccagtcgtcgtcagcttatcaacttcactggccatcaaagatccatgtggtgtcattgtaaacagaaaatacaataaaagttcatcatctgctttgaaaggcaaaacagtatgaagtgaaaagaagcaaaatcctagagacaccgaccttgagttagaaccccaattctatcagtgcccatggtctactcaagctctgtgaactccagtcttctcattgatcaaagggatagttatgtctgccccagggatttgattttctagtgaaagttaattgcgataacagggaaagcacctggcacctacaaagtgtgttcagtaaatcttacccctacataaacgtgagaaaagtgttattagtaagtattactaagaatgttactacattctgagccaggtggtggtggcgcacgcctttaatcccagcacccaggaggcagaggcaggcagatctctgtgaattcaaggccagtctggtctacaaagctacacagagaagccttcccttgaaaactcaaaaagaaaacaaaaaaaaaagaatgttactacattctacgcatttgcagagagccatggtggggggaagtgaggtcacagtcttgccgaacatccacggcatgagcaccgggatagatgagaaggcatcatccagtttaaagggctcatactctgcccaggaaggcaggatgctcacatagtgtccaaactgtacctgacttgcaggtgtgctgtgccaggcaccatacttccaccacctcacccttcctgccatttcttcagaagcagagtcccctctaatgtttctcatcatacagtgtgacagtggctgctgcttcccattttccagatgattaaactgaggcttggcaaggttgttacctaacaccacaaagctctcagcgggctttggtttttatttagttgttgtttgttttgctttgagatagtgtctccctatgtagctaatttggcctgaagctcaggtgtcacacaacctggcctggtattggtgatcctcctgtctctgcttccttagcgcctttgccacctagcttcaagtagtgtggtttggtgcagaggactagttactactctaccacaggagaactcagaggctagtgagacccagcttcttggaaggatcaagttgggctttctaggaaaagcaggggtgggcctggcgtccaagcctgcaatcctgtctattaatccaagagaggctgggctggagtagggttccaaggttaaggcctgccagggctacagagctcaagaacgggtggagactgccgtatgcattgtgtgcatacatgcatgtgttttcgtgtgtgtgtgtgtgtgtgtgtgtgtgtgtgtgtgtgtgtgtgtgtgagagagagagagagagagagagagagagagagagagagaaagagagagaaaacagagcagagatcataggggcagccatccatccacccagaggtcccagaagtactgagggtggatttcctgtagaaaatggggcggggacccagaatttcacctagtttgcactcaagtaaccgcctacatttctaaagaacacaccacagtttacaaattccttgcacaaaaatgtcccctttgactaggacgacaggcaacctgtgttgggcaatttataaatcctcaccgagctgagttcactgcgggcccaatgagtgtgattctgttactgtccctcccagacaggaaaacagaagccaaggtcagttgtcatgtgccaacagtaggactggaacccagaactaattcggggaaggactcgcttaacctcagtccccaaacaacctgattaagaagcaagcaagttattgttcgagcattgcaggtggggagggagggagggagggagggagagagagagagagagagagagagagagagagagagagagagagagagagagagagagagagagagagactggcaggttcactttgctcatgattaaaccaggtttcctggcaccgtgtccccactcccagactgaaaggcacagagagcctgcaggaggcgacaggcgactggccttgtggacacacccttggccccgggtctgcctatctccactcagcagctgtgctaccctccgccttgagaggaatactctcagactcccagactcagcacccgctgccctgtacaatcattcgggttgtgccgaggcaagattagggaagacccgccctgtgcaacaccctctgggtggtactggctagggttggtgacacctcctcacccaggatatgggaccaagggaggcgggatccaagctcctgggtccaaacccaaggaaggaaatggaagggtggcatggtgtcagacagaagggaaagcaaaaaggtggaaggccaaggccagcgggggtgggggtgggggtgagtgggtcaatggtctatgccctcgatgcgcagcagatgcgcgaggccgcgagccccagactctgcctggcaagtgcagactgattgcacaggatcaaacaccatgcaaggttagtacaccgtgtcctaggtagggcgtcggattttaatacagactaaaagccgccctccttcctgtcctcctcccgcagaggggggtgactgggccctggcagatcgcctgtccccgccccgcgccctccccagagcctcctgcgggctgaggtcgccgcccagcaaagcctgggccctcctcccttgcttgccgcaggtctcggcccatcacccgagcctggtcccacccgccaaaccacatactttcaccatcctctcaccctttcccccgcccttcccgtcttcccggccctgtcctcgccactccgatgatttttaagtccgccgctacctttcagtggctagagaaagaaggaaaggctcgtgtttgccagcgtttaaattacctctgaaaacacccagtggtaaagacaacaaaaggggacagtttcttcaactgcttctgcagagaagcgggaggggtggcccggtaacctccacccaccagcctcacgcccaccagctgtcttctgggaggaaggcacccgggtcttacccctgttccctcccccacctcctctttgggcaggcaggctgtctaggccagctgcaaggcttgtccatctcctctctcagctagacggcatggtcccttgtgcctgcgcagaaaccaggactttttactcggagggctgcgctattgccttcccccctcgccatgtccgctacggaccctttctggatcagcttcgttcccacaggcaacgtcacctgctatctcatggcacctgtatattccagcccagtttaagcaagcccttaatttccatttcctccagcaaataaaactgcctgattccaacttctgaggacccaaggaagacaagagcctctgtccctgaggccattttcagcaatgctcctagaatctgtccacagccacagccggtcccctacggaagtcccttcttaaacaatcgccctggcaaccatccagaacaaggagagagctctgcactccttcactggccctgcctgtcctcaggaaagcttaagcttcccgtgcctcttccctacttccttacaatctggcgtctagagaatcacctgtagcaggactatcctcctggaaagaatcaggctgagaaagatgtctgcaagaaaacattgaacgctagagtgtggacatgttcaagcctctaagctactgtctgctgctaatgatgtgagcttgggcgggtcacttgctaaacaccaagtttttctccagagtgctgcctgctgcccataaaaaaaataaataaataaataaaaatggtgccaggtaccacaagggtaacagaactgtgctattttttctgggattttgttttttacttttttttttttaatggagagtgctggatgtctctacaattttgctcaaatgactgcagaacctggaaaagctgttgctgctattgatgcataacatactgccattattgatagatatatatatatatatatatatatatcaatatgagagagagagaggatacgcaactgtgtaggcacagttcttcccttccctgctcgccactacagatggagcccagggcatccatcacacatgctaccgtatgtccctggcagctggcctgccacatctccacactgccgcctgaagccacctggagagctcttttcagagacagccacttgagtggaagtgggattcttgacttcactgcagaaaagcgtttcagggcaagccagtatgaagcagagttggggtttgttaagaaaacatgtctggtttaagaaaagagggaagggctagctgggcatggaggcaaagacatttaattccagcactcggaggcagaggcagggggaatctctgtgagttcaaggccagcctggtctagagagtgagttccaggatgggctccaaagctacagagaaaccctgactcaaaaaaggaagaaagaaagaaagaaagaaagaaagaaagaaagaaagaaagaaagaaaaagaggggaggactcgggtcagagataatacacaccgagaactacaggtgtgtagacctttcaagggacagtctcccccacgtgtcttagtggtagccatagatacagttttggtaggtctcaggttatatctcaaagcaagactaatgtagggcccagagcagcttggtacacaccttctacttgaccctaaggcaacacctgaccccaagaaaagaccacaaactgggaccacccaagcaccacccaggaatggaccatccaaggggaaaacgcctaacattccaacacaaggtgtccctcaacccagcacacacccatcccctttcaccaaggcacccctagacaaatgacagccaatcaggggtcctgaaccttagaaacccccaccccaacctctgctatgataaaaacccccaccccagttgagctggaggctgtctgattgtgccaatgagagtccaaattcaaacttgaataaaggctctttgcttttacatacaggattccatctccttgctggatattgggggattctgagatctgggcataacactaaaaagcccttttttcttgctccaccttttttcaataaatgagattaaagtgtgattccagaggctccttggataagattgctatctgagaaagatgacaaatccgtgagccacaagagttgtgcaagggggttaagacatgtccatcaccataaatggggtttctggtgaggttctgtcagctgggaaaggggaaaggccaaacccacttaggtctaaagcatgagtcacagccatttaccatctctatataaagtgagtactatctcgaggtagatagactcaccacaagtttcgtggattgcactggaacttagttctcagctggcaagggactccaagcagactccagcataaaggactcccttctgttcccttcctacggccccttaatttccttatctttctatgctgtctcctcccattgtttgagaccaggtctggtgcatgtaggcaagaatgacctcaaacttcttctggtctttctgcctccacctcccaagggctggaattacgttgtgcactaccttgtctggtgtatactgggcttgagccggggactttatgtgagctaaggtagcactctaccaacagagcagcaagctcagaccccaggaagaatttttgtctccagtggtggtggtgattttggggggggggggttgttgtttgttttggttttggggtttgggttttgatctttggattttatttattttttttgtggtggtgggtttggggttttttattgttgtttggtttttgttttgaaacaaggtctgcacagggacacaggacctgtgtttcaggacaacactaaaacactccagactggaatgtgctatgtggatccacctgcctcggcctccagagtgctgggatcaaaggtatgcaccaccacacccggcctccaggagttcatagccaagtgcttttcacccagccagctgtcagtaatgttgcctatgatcatttaggcaacatctgtaaacccctacaatgaacaagcatgaacccccctgcctcaagagtctttcggtccaaaggaagagtagagtgtgcaaacaactggaaatgaagaaaaccagaactgggctgatgtagttccgtgggagaatggacgccctgtgttcaacaaacaaacaaaaatcaacaacaaaaacagcattaagaaacaccattatgctaggcgttggtggcgcactcctttaatctcagcactcaggaggcagaggcaggcggatctctgtgagtttgaggccagcctggtctacgagagctagttccaggacagcctccaaagccacagagaaaccctgtcttgaaaaacaaaacagaaaaaagaaagagagaaagaaagaaagaaagaaagaaagaaaggaaggaaggaaggaaggaaggaaggaaggaaggaaggaaggaaggaaggaagaaagaaagaaagaaagaaagaaagaaagaaagaaagaaagaaagaaagaaagaaagaaagaaagaccattccaggtgacaatgaggcagggtgagcttcagggagatcacagagaaggaaggctgatcttgggggcagagcacctggacagccccacccagtcaaccccagccccaccccactccccaacagagctacaaatcctaagtgaagcaggaggaagaggcggggagtgcggccccggaggcgggacccaagcacaaagttaactctggagaaacagttgagccccggccccaccctactggagtctacagggaaccaagcatccggagtgctttacagagacctgtggttcagtatattcctgaaaggcacgcgtccgggtggaaactgtgtgtagaactacatgtagcgggtacagggagcactgaaaagcctgcgctatgaaaatgaaccgaaagcttatgcaatgtgacacacaagtcacccctcctcctacacattgcttggtgcctctgaacgtctcttctccatccaaatccacctgtggtgatgtgttccttcttaaattctcctgtttgtaacttagtgtccacttcttacgccaggacaccagaatcctcaagtttttccggaagagcccgctgagctctgctaggcatagccctgctaaaaatcactagcacggctttgatgaaggagtaggtcaccggccccctttatctgttcttagttggcctggtgaaatggatgcttaaaatgcagtcagtcagctgggcagagataacacacacctttgatcccagcagttgggaggcagaggcaggcggatctcagtgagttctaggacagcctggtctacaaagcaagttccaggacagcctgggctgttacacagagaaaccctgtctcaaaaaaaaaaaaaaaaaaaaaaaaaaggaagaaaaaagatgctgtcactcagcctcaggaaggaagagattatgcagtaagtcaagcctatttgttggggtttttctttcttttttttttactctttactctttgggggcctgccacccagctcccaaatcaatcacagagacttataataataataatatttataaatgcccggtcttagcttggcttatttctagccaacgtttaacttttgcccatctaccttttgcctctgaacttttacctttctctatttctgtatatcttttttttccttcttattttgtgtctggctgtgtggctggatggctggcccctggcatcctcctctcctccttttctaactcctccagcctatatttctcctattatttattctttctgcctgacagccccacctatcctttctcctaccttgctagtggccattcagctctttattaggccaatcaggtgctttaggcaggcaaagtagcacagcttcacagagttaaacaaatgcaacataaaagaatgcaacacatctttgcatgattaaacaaatgttccacagcatacaagaatataacacatctttaactagtattccacaacactgtggtgcttcctcagtttccctgctctttactgacaccccggtgctcatctgggtatggtggtttgaaaaaaaatggcccccaaagggaatgacactattaggaggtgtggctttgttggaggaagagtgttactgtggggatgggctttgaggtcttctttctcaggcttcactcagtgtgacagtcagtagagttactgctgccttctggtcagatgtagccaccaccacgtctgttgcatgccaccatgctccccgcaatgatgataatggacaaaacctctaaaactgtatgtgaaccaccccaattaaatgttttctttataagagttgctgtgaactgggtgttggtgatgcatacctttaatcccagcactcaagtggctgtgagtttgaggccagcctggtctacagagcgagttccaggacaggctccaaagctacatagagaaaccctgtcccaaaacaaacaaacaaaacaaaacaaaacaaaaagagttgctgtggtcatagtgtctcttcacagcaataaaaaaccctaagacagaagttggtaccagggactggggtattgtgatagacctgaccatgtttttgtttggagaaatatggactttgatactttgggttaggaaagcagtggaatgcttgaagcactgcttaatgggccatcccagtaggagcatgggagagacaatggtgctgataatgatttgaaatgtccagagctggctcaagaagtttcagaggagaattttagtatgctgcctagagataattcttgggatattttggtgaagaaagtggttgccatttgcccttgtccaaagagtctgcctgaggttaaagagttttggattaattttcttggcagaagaaatctcaaaacagcctaatatagactctgttatgtggttattagtggtaactctaatggagatttataatgaaaaggagcaaactgaacagggaaaattacaaaatgtaaattttgaggagaaaaagagcaccgggaagaggaatcctatgttcaacgagataaatggattaagaactggaatacagggagtgatgacctcaggacaagatcctactcagctaaattgccaacttgtgaaaaagaactagagaaaagcttagagccaagtgtggtgggtgcgcacctttaatcccagcactggggaggcagaggcaggaggatctctgtgagttcgagaccagcctggtctacagatcaagttccagggcaggctccaaaactacagagaaactctgtcttgaaaaaccatctaaaaaatgtaattaaacaagggagtcatgttccagacccattaagtacagagcttggcaactttagccatgaggttctggctttagagttatggatagaagaactgggctatggaatttacttccatgcctaaagaaagctgctgaggccaggcatgtgtcaggggtatccctgaatagaggcctagtagagaggccattaggtgaatctgtgaagttgaagcctgaattgtcttgaagaacccaagatgttagagatgccagagttgtgggatacctgctgaagagaaccactaacagggggtggaaccagcccgagagaaagaagtgtattgcagtcaacaaatctgaacagaattgagatgtggagagcgttgacatcagacacggagatgcagaatttgcagtttgcccatttggttttcagtcttgctttggccccgtatttccttgctatactcccttccttatgctttggaacagtaatgtatattctgtgacattatgttgaaagtatatgatctgcttttttactttgatttttgcagggggattacaattaagagaccgttgtatgtttcagaagagactttggacttgaaataagtttgagactgttatagattatggggacttttgcagtaggacagaagcattgttttgaattatgaaatggctataagtctttgggggccaaggagtggaatgtggtggtttgaaagaaaaatggcccccaaaggaagtggcactattaggaggtgtggccttgttggaggaagtgtgtcacgtaggggcgggcctttctcaagcttcactcagtgttgacagtcagttgatatcctgttgccttggagtcaagatgcagcactctcagatccaggactacatctgcctgcacaccaccatgctccccgccatgatgataatggactgagcctctgaaactgtaattgagccccccccccacaccaattaaatgtttctttataagagttgccaggcttgtggtatctttttcacagaaaaaaaaaacaaaaaaacaaacaaacaaaaaaaaaaactaatacactggatatcctctccatctggagaaactcaaggggaaaaaagctttgtggaaggcagtcagtctgtctacctcattccactggccacagggatcagtatacctgtggtagccatgacacatttatataatcagactgacgatagggctaggaatgtggagcacagtcattgtttcttcagagacagcagctaaattccaggagcatttggggaccagaatcagataaaaggggacttagattttgggaaaactgttaaactgctggattgagccttgcctggagccttacttgatgctaggcttttttccccccaacccaagaatgaataaatccctctatattattgtaaatcagtcttagcttcaactttttaatttcttgatgttgaagaaatggcccagaatcagtttaaaagtgtaacaagaaatgtgaaatgttgcaagcaatggtgaaactagagactagagtagttaaatcatcaaaatcatcaaaggttttccttgctccaagccaaaatactgaatttcttgtaggcaccaggaagccctgctcaaaatggttggagagagaaagtagctgaatttgtgttaggaagttagctctgatggccagagcatggcagataggaagggggacttgaagcaaagaactggttatttgttttggtttgttgttgattggttttatttttgagacaaggtctcactatgtatccctaactagcctggaacttgctatataaagcagactgacctccaactcacaaatatccacctgcttctgtctctttgagtgcttccagtaaaggcatatgccaccattcctgaccaaaagcttgttttgattagaaataagcctaggcattttatcaaacaaccccagatgtggatggcagggagtcagccagcagtcaactcctttagcaataccttatcagtgccaagggcctttccctcttctcccttgagggcttgcagtacacagaggagaggccaaacccccacgcctctgctcctcagagaatgggcacttagaagctgctgctgctaaaaagtgtggcctgctcacttgggctcacaaggcaagtcacctgcttagctctgctgcttggtgtgttagtcacccccgaagtgtctccccctcaaggctgaagacacagagataaatcactgtctgaaaactacagtcacctcaaaagaggccatcctgctacgaggcaactatcccactatccatgctgtgaggctgcaccccgaggcagaagtgatcatctggaaagaactaactagacagatggccacaagggaggacttcttcagactgccttgcagaccgggagggatcgagacactaaccagcctgcccacaccctaaacaggactgctccattatgcagaccacttgcccctgtggcaattcttcctctatttaccccaaaggcactggacccctttgttcttcctaactcagctccactgaacaaatcttctgtcccttctcattgctggtctctttcattgggggacagggggagctggagcctagtaacgcagtcagaacacagacatttgccctaaaaactccagtaatactgaagatgggctccggttgtttagaaatttaagaaacaggaaatttgtcattttaaatcttttttgttgttgttgttgttgttgttgttgttgttgtttttcaagacaggatttctctgtattgctttggatgtcctggatctcactctgtagaccaggctggcttcgaactcagagatccacctgcctctacctcccgagtgctgggattaaaggcgtgtgtcaccaacgcccggccgtcgttttaaatcttaaagcaattccttacagcttttttgggggggaggcatgatgattcctctgccctcctttatatgatcagataaaatgacttcgagttgctttgttttaactcttgactccaggcctgccttcctgcggcagccctctttactgtcgccgccctccctcgggctggccctgccaagggcggtgcagcatcgccaccctctctttgctgcagcagccccgtggctccactcttcccagcctgactcagccccctatcccaggactgcctcccacctgcgtgccaaactgttcatttgcacaattcaggttgattcccttacggggctccagctgtaaactactatggggtattttttagtttggcaagaaaccagagtggctcccaccactctctaccagtccagtgtctccacagggccgaatatgggcaaatcagtccttctgaggcttatttcccttttggcttctagaaatagaagtttaaaacacacccaggggtttctaacccagagaggttcatagaagcttctagtttcactggttactggcttcctgtctgagtcacagagaaccaggcccagcagtgactcattagtgttgtgatacccttgccattgccgccaccatggctgctgctgggctgccctagtctcccggttagctggagccacccagatgggcagcaggaaccataggacacaataggttgcccttgagggcaggagaccaaaccagaagtcaagagttctaagttaagatattatattctatcatagcataagtaactgctagactttaaaaattaaaatagtattctcataacttgaaattcgccactgtgaagaagttttagcggatccattgtaccttcctcaaagggaaacactgtacctttgagcagtctttgaattcctcccctccccagacaaccacaaatctactttatgtttctgtgggtctttttaaggtccatccacgctgcagcatgtaaactgtcccatccctcgttatgatggacagtattccagcatgtggccacaccacactttatctgtcatctgccaatgcacactagagtatcttccttccacctttagcttttgtgaacactaggaacaggttcatctttttgtgctgttgtctgttttcaattttcttggactctttatggttttacttgacatataggcagatctacagaagacgatgtcatctgctatgactgtactcattacagggtgtttgggacaggcctgttctcagtaagaggtggtggtcggtccctcaccactgaatattgtcccacctgtactgcagcccagaatacccagctacctacatccacagatgccctgagcactctttgagggaaggactgccactgataaggtgtgtcccccaaattcccatgctggcagctagagccccagtgaggaggtgctaagatgcagcggaagctttaaggtctggtgggaggttgttacaggactcttcttgatgagtctattcccttcctgggatagggcagctattggagtgatcactgttacaggccacttacccacggcctggacacttagtatgtgttgcgtgcttatgttgctcctgctggttgtaggtctaaatttgtgtatgtttttacctttcttcctccgggactacacttggtatctgttattattgtctatagtttttgtatcaggtttgaaaccctcttacttcgacaaaaaggggaaatgtagtggtaattagttccaccaatagttttggggtaccggccttagggcgtggcttctgtgttcagacatgatcccttataaggaagaggagggatctctcttgccttgtcttgtgtggtggtcggagaactgacagtaccatcctgtgcctccagggcagaagactgaggcggttctttgcctacattgtgagagtgtccccaaataaatagttgtttttcttttatccaggcgtggccggacttccttaacccgccctcacctagtccaggcccccctccctcctgctcacatttctgccattgcaccacccaccacagtgtgacagagccaagaggccccactcgagccaagcagatggagtttcatgctcctggatttcaacctctgaatctgggatctgagcaaactccttgtctttataaaacactcattttcaagtgttctgtcacagtaacatacaatgcgttggggcccatgcatgttgatgctgagcccttccttacacttgtgcacacccctgcgctctcaccatgtgaccacatggctgcagcacctagtttgactcctacatggcaataacagtcaacaagcaaatgaattctccttttctctgcccagaaaagaagcaagtcaggctttagttaggcagaggctccttccatggatcttgtagtaaaagaaactccaagtacattgacaagcctaaggtgaatcctggtcccttctccctgccatgggaaggacgctgcctggattgggtgggaatgggagcccaggattaggcccctcgagattgtgtgggatgctcccaagtccttacctgaagcagaatgggtgagtctgacagaagcctgagaaagaaagagacacaggagccatcttcagcatccagcatgtctaaaggtctcttagacaagactatgcatgtgtgcacaagtgtgagtgtgcctgagttgtatctggactctgggagaggagaagaagcacctgtggcaccccaacactgggtgcatagagccagggagaggctgcggaagaaagccagccgctccctggacaccagtgttcagaccttgactgttcctgaaagatccatcctgggtcaaatgcttgattcctagttgataaccctattgggtggtagtaaaacttttaggggtggggactcataggaagaagctaggctactgagggagtgctcctcaaagggggaccctcccctcctgtcctctgtccccttctaggcagctttactccaacatgtgctccttccatgatattcagccccccagcggcccgaagacacagggcccatcaactgtgaacagaatattctgaaaccataagccaggataaacctttcttctgtgtaagtcctctgtcttgggtaatttgtcacagccacagaaagctgatatgagctctctaaaacccctgaaagagtcagtgcaataaagatgcagaaggtacagtagcatgggttcaacatagaacaagctggtgggctctttggtcaaacatactcttccccggccccagaccggggtcacttgtcattacagttttccagtgcgtggagaatggagctcagctttgattaggaaagatccacctaagagtcctctagtgtgaagtaactatgacaaatgaaaatggtccaagagccaggaacagtggtgtgagtcctgagttctagccatttgggaggctgaggcaggagcatccctggagctcagacgttcaagactagctagagaagcactgtgagagcttgtctcttaaagaacaagacaagaggctggaagatgtctcatttgggaaagggctatgctactcaagtatgaggacctgagtttgatcccaggaaccaatgagaaaaagccacagcatggtgatacccagcatgtgctagggaggcagaggcaggaagatctctgggactggacgccactcagtctagctcaatcagggagctccaagccaatgaaagaccatgagttaaaaaacaaggtggacaacacccgaagaacaccaccaaaggttggcctatagcctctatgcacacggaaacacagacagacagacagacagacagacagacagacagacagacagacagacgactcaaggcgctgcattttctatttccacctcttcagtgcatttgagtgtattgtctgtacagtgctgaagaggggctgcttcccggcactgttaactgagggccttggccaggcctctctgacctgcagggcacagggattctgagcttcctcccgcttcccctcacctcaaaccccaacccccagctctgctcttatctatgtccctgagcttcaaatgtatacgatgccagggataagaaaggcctcaatcatacccagtttacgatcaacgcgaaccacccccagattcccatgtatttactacagctacctaagtcactgtgaagggcccgcctgctcatccgctcacctggctgagaagttatggcctctaatgctttctttcgtgtgctctagtccacgtttatatgccgccactcctcccaacaaaggcatggctggctttatttcagtctcgtcatggttctgcttcaccccgcacagtagctgtgtccctggaaaaccgtgcaggtggcgtttcaccaactgtgctatgtttgaaaagcatgaagaaggcttcccaatggaagaaattctgcagtaagtaaatactgaagagtagggctacaaaaacacgaaaaacgctcaggacttggtgtgaagagaaaaaaattcctatcatacttctttgtgtatcatgattaaatttttaaataacacaatgaatatacgataaaattttagagtagattttaataaaagtggcaatagctacacaaagggaatagaatataagtaacttacatcgcattttactttccaaactttattgaatgatggggctggagagatagctcggagcttactgctcttgcagaggacctaggttcagtttgcagcatctatatcaggcatctcacagccacctataaatacagatccagagaatccacgccctcctctggcttgcaattgcacatacatggtgaacataaatttgcacaggcacacacacatatacacataattttatagagcaaggttactgtctataaattagtctttaagctaaaatgtaaatcataaccctataataaattctattttaaaaattgggcaattattgccttgggtccagaaatgacagcaatgtgactacatccagaagatcgcaggcaaaacaattattgacactataggtggcttgcaaatctttatatattcaacaaataaaaatgtctcagaatgttgatcacataaatcagctgcctatctgatagcctcttgattacttaccacatcaaatttataaacaaaagctaactaaataactttcagtaaaatgattctttaaaaaaaattaaggagcctggtataatggcaaatgtctttagttcaccatgggaggcagaagccggtggatctctgtgagttccagtccacactggtctacacagccaaggctgccaaaggagaacctgccccccccaaaaaaaatggccagacagttgtggcctatgcctttcacctcgtcactcgggaggcagaggcagaggcagaggcagaggcagaggcagaggcagaggcagaggcagaggcagaggcagaggcagaggcagaggagaggcagaggcagaggcagaggcaggtggatctctttgaggctagcctggtctacagaatgagtttcaggacagccagggctacacagagaaaccctgtcttgaaaaacaaaacaaaacatcaaggaggaccggagagttgagtcagtggttaagagcacttgttgctctttcagaggatctgagtcccttgggtttgattcccaatgcacacatggcagcttacaaccattcatactctagttccagggtatccagcaccctcttctgaccttcttaggagccaggcatacacatgacatacatgtacattcagacaaaagacatatatatataaaattaaattaattaatttttaaaataaaaatcaagggctgaaggtgtacctcaataacagagcagttgctttgcgtggatgaggccggagttaagtctccagtcatgccaaaaataaaaaatttaaaagtgggaagattttatttctaggtttaaaatatctttgtcagctgttaacaagtaaacaagatttatgagctgattaagggcctggggtcagtgccctcactctccagggaagtcattaaactaaaaccttgtattatggcaaagcctgggaccacccagaggctgagaagaggccccacagggaccatgactgttttgtggagaccccgaactcacagacagccccaagttaaaaatagaacagctataaacatgttctacttcccacagatggagacaagagtctgccttaccacagcagtgagctgtgagcagagagctgccccacagctgagctgggacacagacaggcaagagcacgaactgctgagtaagagcttcccttccgattggaggcctgcagctcagttgctctttgtccgctctgggtcacctatgagccaccacaggtgtcctacgaaaaccctggctgtgcacctctgctctgtagcaattagatggcccatcaccattctgccaccgttgattaacctagtggaagcaattcagtgcaactgtcaatagatgtctgcttctccctccagattgactgaaactcaaaagaaaagcagctttttaaagaaaacccaaaaagagaagcaggagaaaccatggcaagtgtactggcagcctcagaacacaggcctggcacctgtcagccttgagcggcacctgggcaaggacccccaactcctagcagaacaggtaatttcatggacagaaatggctcagcccaagattagtgaaataaaagtgaacttccaggagtgaagagaatgggtttacatgcgtctagcattctatttctcactgttttatctctgattataaaatttacaggatgtacctgtgtaaacaggaatgaaatatgctttcatggtcactaccccaacatccctcctcagaaatggagcgagggaggtcttctcatgaaaattcttagattttaaattaggaaactgaaaaaagactttcaagatattaatttcctgtattaatagactcgctacaacatacccaaaagcagctattacaagttattcaaagggatttcctttggggaggaagagaccatctcattgtatagtccagcctgggactttctatgtagcctaggttggcctcatcaccttcctgcctctgcctcctaagtgctggaattacaggcatgcgccattgtgcccagcaattctccaagtgcttttatgtactaaattacttttcttttctgaaatcaaatacattcttggaataattcaactggattaatcaaatttgtaacaataaccaaggcacaaaccttgcttaattggttataacgagccactactaaggaacaaggattgtgctttgcaggccctgggggaaatgcttcttatggcaatgactggcaagggttagtggccctaccaaagaagacaaggtgctgtttgtatcccatcccagcttctgtggtgtgaatactcccttatggccaactccaacaggaacagctggctgaggaaatgggaagagctaagcagagtcacaccaccgtgaagcttttccaccagaaacacacaccacccttccaaacacccggggaaagaggggaaataaatgctgtccaatacttgctaagtgggatgtgttgaagacatgctgctgttgttttcaatataatctatctaactgtaaattatctgatgcaatatttaataatgaccatgtttaataagcaacttataaaatcatttcttgtaagccagcactcaccagaagtctattagtttaactctgtgtgtgtgtgtgtgtgtgtgcacgcacgcacatcagaaagacagagacagagacagagacagtatgaaacatacatacacacactggtgtggaggtcagagtcacttgaaggagacacctctctctcctaacatgtgggtttagggtaatcaaactccagtcgtgaagctctatggcaagtaactttgcctggggaaccatcttgctaaccagtttttgggcctactctgtggcttaatgcacatcagctttataggtcgtaaagaatttccttgagctggacctggtagcactcatttgggatcccagcacttcccagcactcgggaggtggaggcaagaggatcagaaggtcaaggtcattcttggctacctattgagttcaaggtcagtctgagctacataagacactgccaaaaacaaaaattaatcccccagtgtgtcaggaaagtggtaaacttgaaggtgtcagacaaactgtgccattatgggtaatatggacagaacctcaaaggaaggaactgagtgtttctttccattcactcagtagatggcctgatacataaaagtacatcatgactgtagatctgcgagttaagtctcaagcccaaaggctctggttttattactctataacaaggatgtctttgtgtgttcatttcttttatacactgtgtaaataaaaacaggcaggtaagtaaaacaaaagtacaaacaagttgtattggatcaaaaaatctcggcatttatgaaatcaagtctgcaagacagagagagagtgactgtaactataagggaaaaccaccacgaaaaggtaactcacccctcactgagctgcaattcatcaatggtgagggaatagggagaccatttcacacagaaaagaaaaataaaacatgaagttaaattgtttttttctttaggaaagcaggtttggggctggagagatgcctcagtagtttagatcaatggctgattttacagaggaccgagggttgattcccagcacctacatagtggctcacaaccatctttaactccagttccaggggacttgatgcctcttctggcctctgcaaacatgagatgcccacacggtacacatgtgtacaggcaggcaaagcacccatatacagaaaatacagaaaaataaaatacaaattattcaaggattatagaggagagttggtatacttacactactagattacttatttaatcttaaaagcagggaagaaaagattttttaaaaattaacagtattggcagaccaaccctacagttgcccaggcccaaaactagggttatgacttggccagccccaacatccaccccatctatgatccgctggagcacgtgcaggggcctgacccacagacccaaagctccagggtctccacaacctagggcagcaacagggtgtcccagaggaggcccagtgagggcccagcatggatagtgtaggaaaaaccagaggcccaaaccagaccaatgactctttgcaataaacacttgcaagcaaagatacgtggacaaaagggtttactgtgtgactcaatgtgtcctgctgcggcttccaggatgagatttttaatttttctccagggtggggcagggggtgggggtggggtggtgagggtggggaggctgcaggggcggagggtggaagtgaaggaacaggaaaatgaatgagatcacgatacatgatgcattgaataaataaaaagtaaaaaaaaattaagaatgttggggctggaaagatggctccatggtcgagagcacttgttactcttgcagggtaatggagttcagctcccagcatctacaaagcagtttgtagctgcctgtaacttcagttccagagtttccaatgccttcatctggtctctctggtacacagattcccatgcaggcaaacatacacacaaaaaaacaaacaacactttttaattaataaaatgagtaatgttagataataaaatgttaataaattggcaatgtttcaggaacctattcagtctcatcccattgattgataggactggtggcacactcctttaatctcagtacacaggaagcagaggtaagaattctctgagtttgagggcagcttgatctatatagggagtttgaggctacattgtgagacccataattattcattttaattatgtatgtgtttgcatatctgtgcatctgtgtagatatgcgcacatgagggcaggtattctcaggatctagaaaggggcatcagatcccctggagctggagttacagatgcttgtgagctgttatatgagtgctggaaactgaactctggtcttttagaacaccagcaagtgtgctccactgctgagccatctctccagagccttgtcaaaagagtcaatgtaaatgaaatgtccaaagaaaagaacagaaagagacagccaaaatacttgagaaaaataataaccaaacatttacacaaaactgccatgttgccactagattgtaaacatagggaaagccagtaattctgactcacgcttctgtaatagctggtgaagcagccaaaatagttagaccacacaggagactatcaattaatacctattcatacatcccacatcaaaacaattatttactgaggacccagtatgaggaaggtgcccctggcaggggtgggagtactttagctacagacactgagctgagtaaaggaacgggacttaaagggaaaagtcttcatgcgccttctgaggagaaaatgtgcctggcagcctcggccgggtaatgtgtcattatttaattgcacttatttatggtggtcctaataaaataatgtcagactgagctcacagtcagaaggggcatccacctagaggtcctccaaataaaatggttattttcttgcccagctgtgtttattgagagcagaacggtgagacttctctgtaaaacgttacatatgtggtatgtgcgtgtgcacacgtgtacacatttgtgtactccctaggtgtgcgagtgaagacaagagggcaacgtcaggtgtctttctctattgttctccacctcattctttcagacagacactgaacttgagggttcacctgaactggctggccagcatgcccaagggactgcctgtctccaccctgcctgctcccagcactgggggtacaggagcattccaccatacttggcttctttgtaggcaatggggatccgaacccaggtccccagccccagcttcctgaagacacacctgtctacagataaactccacagaacacccagacagggatgctccaatctgaaaggctcgtgttggtgtaagcacttggtgtaagactcgatgcttggaccataaattttgtcaatttcctagaagggagctgctgggaatgtctgtttctgttatgaaatagaattgaatcataaagatatgagcagaaattagatttgggtatgtttacaggagcctcagcatccaggaagtaacatttatgagcttggctttggatctgtgacaggccctgtaagtggcttcagtctccctagtgtgtgtgtgtcacctgtccatctgggggtggcactctgctgtccacctcatagcagctcttcatccatagaatcctcaggctgtcacttcctgagttactacattgccctgggctccagcatgcacttgatctgtgtgtctcgaatctggaagtaggtattgctcagtttacagatgaggacactgggtctgaggttcagctaataaatggtggagccaggatctgtctgcggccactcactgacttaggctagtttgcttttggtcattaagcatagttgagacataaagagtgtgatagatgatagatagatcataagatgattgataggcagatagatgatgatggatgatagatgatatagatgataaacaatgacaataaatagataagtagggagacaatgtagatgatagatgatagatagatagatagatagacagacagacagacagacagatagatttctctgtgtgtatatataatataggactgcacagagaaggcataaacctcaatgagtattgcagtctgctcagatcaaccaaagactaaacagcacagagtgaaagctaaaggctacacttaaggaccatacataaaacatgaagagagaatttgaaagcttgtggtgactactgaaaatccctgcagactcttaaaactttcatattgaatgaatcttaacatagataataaatggcctcaaaggggcagcaactgtcatatgcccagcatggaaagggttgtgtgttcccctctacacggtttctctgtagaagcactagaaaaatgcagtttcacaagttcctagctgctggaaggaacagaggcgtgcactgcagcagttagcttggtgcatgcctcgaattttccataattaaagttttaaaagaaagggtaaaggaggaagaaagaagaatgggaatctacctaagatgggaaagggctgataacctgaacaaaggaggaagtctgaaagaatagcagggagcaaagagaaagagtgttgctttaccactgacagcagagcccagcatggcagtggaggcctgcaaacctcagcatgcagaggccaagactggagaattgcaagttgaggccaacctgagctacacagagggacttggtctcaaacccagccttctcacacacacacacacacacagacacacacacacacacacacaaaaaaaaagccagcaaggctttttatagatataaacaatcttattccaaaatgtatatggaaaggttattacctttccacctagaaaaacgacaatatagaattataacaaatgtataagtaactatgtgacaacaactgaaacaaacatacagggaagtgagggtgcagccctcagaggttataagatacaaggtgaaatatcatttgaacaacataaggggacgtgagggtgcagccctcagaggttataagatacaggtgagatatcatttgaaggcaggctgtgaggagccacgtttgagactgcatgccctgaaatagtcactaaaataacaaagcaaggcattgcagctaacaatctgatagtgacataaaatggatacataaaacactttagaagaaagaaagaaagaggactctgctcaaggcctcctggacaccctcccaaaggctcatgtatggggaggactggttcccagcatgcacaattgggatgactgagagtgcccccctggtcccttcatcttcctctttttatttctggccacagtgagtggtttgtcccatcatgcacttgtgccatgatgtgcccctttgtcaagccccaaagtcagctgaccacgactggaggccctaagtctcatgaaaggttgtttcagttggttggtttgctctttttgttagtttgtttgaatttatttttatttcatttacattggtattttcctgcatgtatgtctgtgtgtgggtgtgctatttcagacagttatgagctgccatgtggatgctgggaattgaacctgggtcctaaggaagaacagctcttaatcactgagccatctctccagccccttgctctttttgttttaaagcaaggcctccatgtgtggtccaggctgacttcgaacttgaattttcaattctcctgtctctgccttccaagtactgggattagagaggcctgtgacaccatcctcgggattctggtgggtttctgtacagaaattgacaagcagccttaacatttatatgataatgcaaggaatttacaaagtagccacaacagccttgaagaacatcactgcctgacttccagatatattaaaaaactaaaggaatcaaaacagtgcttggaaaaaagttgattaaaagaacagaatagagaaatagagggctcgggtatatctcagaatacagggcttgcctagtttgtgtgcagtccttaccaccatccagaaagggtgcagaggaggcaacaggatggcttagctggaaaaggagcccctgctgacctgggcttgtatccccaagaattcacatggtgaaaagaatgttgtcctctgacttccacaagcactgtggtacacccatgctctgtgtgtgtgtgtgtgtgtgtgtgtgtgtgtgtgtgtgtgtgtgtgtgtgttacacccatgctctgtgtgtgttacacccatgccctctgtgtgtgtgttacacccatgctctgagtgtgtgtgttacacccatgctgtgtgtgtgttacacccatgctctgtgtgtgtgtgtgttacacccatgctctgtgtgtgttacacccatgccctctgtgtgtgtgttacacccatgctctgagtgtgtgtgttacacccatgctgtgtgtgtgttacacccatgctctgtgtgtgtgtgtgttacacccatgctctgtgtgtgttacacccatgccctctgtgtgtgtgttacacccatgccctctgtgtgtgtgttacacccatgctctgtgtgtgtgtgtgtgtgtgtttaaagaacgaaattataaagcaagctatcaaatttaaaaccagctatgcacggcagtacatcccacatctgggagactgagacagaagtcctaggctgagaccagcttgggctacatagcaagaatctgtctgaaaaacaagtaaagccaacaaacaacagaaaggcaaaaaaagacagtgctgacagaatgaagataacagacaagctaggagaaaatctttatgcagcaaatacctgagaaaggatttggatgtaaaacaggctaaggattttattggccggatgttggtggcacatgcctttaatcccagcacgggaggcagaggcaggtggatctctgtgagtttgagaccagcctggtctacagagcaagttccaggacaacctccaaagccacagagaaaccctgtctcgaaaaaaccaaaaaaaaaaaaaaaaaaaaaaaggtctcactaccccagatgttgttaaaatattagagaggagggttggcagtgtggttcagtgaagcatttacttaatatacaaaaggcctggggctgatccctagtacctcaaaaagcaagcaagcaataaaaagaatgtagaggagctgggctctcacacagttggcaggaatgttaaacagcacagctactttacaaaacagctaagaattttctctaaaagttaagcacttgcctggcttggtgtctcacccattaatcccagcactcagtgttgttcttttgctgccgttacaggggatggaacatggaccaccagactcaacaaatccatgtggagtttattggaggtgttggctaactaggaacagagacggaaggggtgggcacgaagggggaagaagaagaagaggaggaggaggaaggggcgaacaggtggagtgctcacctgtgtacagactccttacacagccatgtaatgcatgtgtagccatggcataacacaggaccctttgagctgcctaagtatctgccggaatgcctgtgcaaggggggcggggtcagcataatgcaaggatactaactcaggagactgaagcaggcagatctctgtgtgactttgagaccagcctgggtctacacagttagcttccagccagcaagactacatagtgagaccctgtctcaaaaacagacaaacaaacataccaagttaagcagagcataatggaattttagggcatcgaactattctgtatgatactataatgaccctgaaaacacaacatacaagtaaatattagactgagcaggttgtatttaggaatacacacacacacacacacacacacacacacacacacacacacacacacacaccgtatgtaactataattgaagaaaaagagaacataaatttgaaggagagcaaggtgggggatattgaaggtcttgatgggaagaaaggaaaggggaaatgacatacttataatctcaaaaaaattgcaaaagaaaatgcaacctaattcatagtcatagcgggcaatctgcttattagttgccaacagcagggtgatgggttataaggggcttaggaaagcttttaggactaatggttatgaacaacaacagttatgggctgtagtgatacttttcatatacatgtcagattatctacttttagtattcacagtttgttgtctgtcagttatatccccaacccaaagctactgttaggatggctccaagatcaagaaagatgtgagttagagattctgacttcacctcctcttgctatccaggctgtgcttagacagctgaaccaagagcgtggtcccgcccgcttcctctaagctccgtgccagggctttacagactccaaatgtgcatttcacagaggcagtaaggggcagcctgccgccctgctctgaatccttatcacctctcctcatcctgtccccgtgtttaaacagctatgcaacgtcatgttcttaggagagtccagcttcaccccacccctaccctgagaaagacttcaaattcagtaactgtaagaaagctagcacagacagaccagttttacagtgtttacagagctctgccagaggggaggccccaccagagactgaagtcgtcagtcatgttatttctgctcttttgcaagtgtagataggaacaggaaaacacttggctatcgcattatctgttacaatcaggttcaactgcctgcaacagaaaatctagtcgtttacatacaaggatttattctctttgctttacaaagagtgggagtcaggtgctattcagttagctctttgaagttatctgtgtctctgccttctgtcttctctggcatgtgacttccatcttcaaggtcacatgatggctgctgaagtttctgctctgagtggtagtggggacttggggggtggggtgaggcagggagtggctgagggaggtgcctggtcatcttgggggtggggcagggagtggctgagggaagtaggttcctgatcaccttgggagacacagccagactgcaggaaaggagggagcagggcgccactctatcggaagggcaggtgcctgatgaggagtcggagacagggcagtttagagcaggtgggctctgaaacagcgcagctgcagtgtgaggaccccatcttcggatgacaaggcttctctttccctgaagagctgctgcggaaagagtatctctgccgtgctgtgggccaggctcaggaccgagcctgcactaatgcacagtctcaagtgcccctccttctctgtgctgctgtcaggctgtgagcacgcgacccacacagtgtttctagtctatggggcagaaacagaaggaaggctccttgcctatgatcagattcttttgttttgttttccgaaaaatatccccatcctgcccgcactccagaaccaaaggtcttttacctgctaggcaagctctctactgcggaactacatacccagcctgttcgtgttcttaaaaagtgttaacgggtccacaaattcataaagatggctgtcatgagggtggtggtggatctattcaacggcgaagattttcttggttttggctctgtggtcccagtactcccaaggttgctttgtcctgttcagctctaagctctcctgctgcagttagtgaaagagaccagtatgaatccagccacactccagaggcccctgaacacaagatctggggacctggaagggacggccctagactttgggcctgcccaaattcagcactgaagtgtaattaatggaggagcacattgcctttgtgtaaaatagatgttagcagggtgtattggtacataccttttatcccaacactcaggaagctgaggcaggtggatctctgtcaatttgagtgcagcttggtctacatagtgagttctaggacagctagggctacgtagagacactttgtctcaaaaaaaaaaaaaaatttgggctagagagatggctcagtagttaagaatactggctgctcttgcagaggaccagggttaattcccagcatacttactcacaaccatctgtaactccagtttcaggggatctgatgccttcttttgacttctatgggcactacgcatgcacatggcgcacatacatacatgaaaacaaaacaaaaaaaacactctcacgcataaaataataaatctaaaaggaaatttcaaaaattgaaaaataaaatacattttagagagaagtactgatataaagcaaaataaatgtctctccttcacacagcaatgctccctggggatcatcacagggtctctggcatatctttccagaatcttctacagacatttattctgttgattgcatttgcaagaatattacttataaatgattcacttagtaacaataatgactgataatgtatcagatgcaccttatttatattgaaatgggaagcagaaaactaaaacagctaaaaacaatagaagttgacaattcttccagagtgcagttttggaaatgaccaccaggtgtcctactactggaaagttacaagagggaaggtggccaccgaaaatgtgggtgactcctccctgggcagctgctttggcccttggcccagtgtctcgtctactggcctaggggtggtctaggaaagggaagctaagaaaaacactgggttatcaggccatgcactcacatccagctggcctccctggtcgctagagaagctgctcaaaactgtcaaatctccgtgagacatacaaacgtggtcgggctcagtcctcctgtcacggcagggctgctttctgaagtcaagacacggttgctgtcccatagttggggaacagccctcctgtttcgggagggacatccagttctgggtagacagagatctgtgtaaggacaacagcagctcttgccacttcctagttgactcagcaccagtttcctgtccaggcccaggctgccatctccagatgctggtcggaaagcccaacccccacaggcagcatacgggcatcccattcaaactctcaggctgctgctcccctttgctgatcccgaatggcctccacccctgggttcccagctctacagagcagacaccatgtggagaacagagtggctcctgggagcaagctttctcctgcacctccctggactgccagcatccaaagggggacaggggacagggcacagttacagaggggctccagcatgagagacctcatcctaggaaggtatagtgggccctgggggaacaggagaaatgttttgaagaggcaggcaaatttttatgtgctctcccaatgagcatttgtcttgggcgctccttggaccacatcctacttctgggccttagacgatggaaagggtgacacagaattcagacccaccgcaaatggaggcatagcaacaccatatgcctgtggaagggacaggactgcggcccttcccaggcaatgaccattccagttctacttgagacatccatgctttctgactggagagttaaggtgacctttttatgtgagttgaatgtccatatctgcctaactggcatatactatatgggctacatgaagcaactgtaattattttagtcactacatgctttaaaagctatctacataatttaaaatgacacatctgtgatgccatacacatagtaaaaatgctggttattattaaaacataggttctattcacactcaaataagattacacagggtgtttgatgtcccatacataatgtataagccagtgcttcatgtaataatataaaggggataaaacaatgcttacattgggatggacgttaacttaccatgcgggataatagctgtgctttgatgtggtctacaaaggaatggcaactaggacacccccccccccattatcctatcacacgtgatgcatgaggtgtgggagaaagaacctctcgtaatatcacccacactctagccctgatgatggcgccaggaatgtgccccatcaggcgagggaggctgagccaatccagctgtccctcttgctggccattgtttcaactgcttggtgacccctggataatactgaaccagccaaagagcatccagacatccgaaaagccttgctttcagtcacaagtgccacttcattgagccattcaaatgacaagggccaacagagacttcacaggtccacaaggacctgaactctttagaaaaggagtggtgggggctgagaggggaaggaagggattcagctccaccttacagaatcaaatacctgcttgcccaccctccaagttaatcacgagttaggcctgtgagtcatccaagaggtaggcggtcatgtcgcgtttgccacgtgtggtatcctaatgacaacagctccatcctcggctaatccttttttaaatggctccacctccaagcccacggtcagcagacaaaggccagcatcacatctccaaagtttcctagtcaggaccatggggcgtgtcccttctagagagtgagtcaggaaattgctgaggtgaacatacaaaaacagcacttcccgcatcagatgccagcctggcacacaaggtcaggctaaatgctcaggcaggttctggtcacgagcatccctcccacgtggacaggtggccttcctcatctatagtcaaagagcttctgaagtggtgacaaatagctgtgcttgttgacatgcaaaacaaagccaaaggaagcattcctcagcaggcctcagctcaagctttcccgtcctgccagcaagaaaagcaaactgactacaccaatggaaattgtagcaaatgggttcccttgctccctgggaggctcatgacatttcaattacgtttcaatacaatacagctgaattatttttaaccttacagagcctcctggcttttcgaaagaaaagcaagttagaggagttgaaggatacatagaagcagagggggttggaggatgggaggcttaccaataacacaggcccataaatagtattattctgatttgggtgggcagagcaaggcatcttttactcaaggaatcaagttagtgggacaccaggtgctctttgcatctcagagtagtagagttcatttccttctgacatgttctctgtgattttggctggatcacaacagaacagttccagacaatcctattgaaattaagaaattctcactgcaccaccttttacacagttttacccagaatctaagtaaactgatctcaagttgggtacactcctttaatcgaagcactcaggaggcagaggcaagtggatctccatgagttagaggccagcctggtctacagagtgtgttccaggacaacctgttactgcagggcccagggcagcttggtacacacctgccacttagctacactgcttccatgactctaaggcaatacctgaccccaggaaaagaccacaaactgggaccaccaaggctccacccaggaatggaccatccaaggagaaaatacctaacattccaaccattgtagatagaatcacaagatgtccctcaagccagcatacacccatcccctttcaccaagacacccctagacaaacgacagcggatcaggggtcctgaacctgagaaacctcccaccccaactgagctcaaggctctctgatagtgccaatgagagtccaaattcaaacttgaataaaggctctttgctttttcatatgggatttggtctccttgttggatttgggagggtgggagatgaggggacacactccaagatctgggcataacattacacagagaaattctgtcttgaaaaacaaataaataaacaagcaaacaaactgatggacagtctcagtagcctgggatgaaaggcaaccgtttttcttttctttttcttttttctttttctttcttttttttttttttttttttttttttttttttcgtgacagggtttctctgtgtggctttggagcctatcctggaactcgctctggagaccaggctggcctcaaactcacagagatgcgcctgcctcttcctcccgagtgctgggattaaaggcgagcgccaccaacgccccatttcttctttcttcctttcctcttattcctctcatgctatgaaaacccactgtgatccctgtcgaaggcctctttgtaaagataaataagcaggctcagatgacggtgctgtagtgaatgacagcggcaaccgtcaggacggatacagtactcgcaccactgtcctcagtgtattattcttctggcccccaacaccgtgctttcggaaatgcccatttcttcttgaaatataccccacgtttaatagacacaataagaagaaatcaatcattttcttcttactctggctaccagaaatacagaagtgcaagtttaaccacaaatatgagagctgaccgtccatctgcggtctagaaggcagcagagagtggggatggtgagcagcggcaggcgtcacctgttggggcagaagcactgtttacatcaatcatttatcttgcagaaatttgtattcaagtctttgaagagaaaaaccagaaattcaaatgctttttttttttaatttgagagaaaaggtctcaagtagcctaagttggcctcaaactcactatatagccaagaataacctagaactccccaccctccaccccacccctcgatacagtttctctgtagctttggagcctgtcctggaactcactctgtagatcaggctggtctagaactcagagagatcctgctgcctctgcctcccgagtgctgggactaaaggtgtgcgcaaccaccgcccggccctagaactcttcatcctcccttatccatcccccaggtgttggattgtacgtgtgaaccgccacgcctgtcagaaatccagattcacacgcacactcactcaaaatgtttacctgtggactcctggcttgactgttttcatcaggttacccatgcgtctttcctagctgtagcagcgtgagtggagacagaactatcaccctggaaaccaagaacccaagactggtagatccagctctgataccagcccacgcttcccttgagcaagacacctcagtgttttgtacctcagctgccatgtctcaaaagttagaagttcaaaattccttctgatccttaattgctatagtgtttgtctgcacagcttttttagaggtcatttcccacaagtagatctcagaacacggaagaagggaaaacaacaaaacctggctgctgcatcactgctcgttctatatgcaggagagacatggcctgggtgtggcaaacacttggctaactggacctcaaggatagacatgctttcatcagcacacaactttgtaggattcccaccacccatcagggaccaccatcactgagtatgaagttccttctaggtgacagaccctcttggcattttgagaccaaccccaaggttgcaaaggaatgttctgagtcagagcaaatctgaccaactgctctccccgagctgggcctcctgtttgacaactcatgccagcccacctgtgatgagtgttgtcctttgtcattgtcactctgtaacttctggcagaggccaattacactaggagaggctcatgttatctgaggctctgacaaagctcatatatgtgtaagtacatggtgtggcctgcacacaagtgacttggatggaggagatgataccttgttttacaaagagcataggaaggaaataaaaatattaaactggaaacttctcactctagcagttacaatgagaagaacaaaagaaagtattcacttcctcatggttatattaatcatgtatctcaggcaaaataaaggcccaaggaatgagggcaaatgtgtgagttatcaccaggtaccttcttcacatggccttttgacatgatgattggctccaagtgacatgaagaagagggtatgaggcacccacattaccaggagttttgtgttttgtgcatcagttaggaacagggcactttttttttttttttgattgtcattagcagctgccagaaagaatctagtgttataaagaatgatgacctttggtccccaaaccagctgcaaacctccacgtgttctgttttcaatgccctggaggcattttcttcaccgtgctctgttcctaccagccttttggtagctggggtgcttgttttaaagcctctatagtcttccccttctgcctggaatactctttaccaggatcacgagagtgattgatgtagatgtcagccttcagggtaccccttagagagcccctcccaactatccatcttgggacaccatctatcatgggacccaacctttaactctcggcttagtaccctacaccatacacctgatggatttccagtttcttcgttttgagtctttcttagaagacagaatcaaatcagctgggcgttggtggcgcccttctaggtgacagaccctcttggcattttgagaccaaccccaaggttgcaaaggaatgttctgagtcagagcaaatctgacctttaatcccagcacttgggaggcagaggcaggcagatctctgtgagtcgaaaccagcctggtctataagagcgatttccaggacaacctccaaagccacagagagaccctgtctcgaaactctcccaatctccccccacccccacccccgaaaaaaaagaagacagaatctaaaacaagaatttaaactgatatgagcttataaacataaaagctccataggaattcagcttctgtgtcttgttcacagcatatttccaggatcgagaatagtaccttagatatacagcaagtgctttaaacactggttaacagaacggatagaggggctgcgtagacagaggaatccatttggcaaatgcctacaaggtccccgcggtgaactaagactgtcatatggatcggggtcttcctcaaaggccacacagcctaccaggaaggacagacctgtactgaaccataccaaaccttcttcccaagatgaccctgaggccaatctccatggaaagtcaggagtcagcatgtgaggaaaatcacgacagaggtaccaactttgaaagctgcgagcccctggaaatctgatatggctggtgtgagggacagagggccacgagagagaggtgtgagcactgaattgtggcctacatgaacaaagaaccatctgaggagctctaagtgacacgatggttttatggcttattgtagtagtgaaggcaactatttaggaaaaaagcacaaagcatttaggaggctgctgtctaatccagatgagtacaaaataaataaataaataatgtaaagaatgcaaaatgctgatggcagtgacaacagaagagtgggatttgaaagctgagcagagcttggtgacacaagagctgcggagggaaagagggaaagagaagatgggcttaaagggattgacagtgtctggctggtgcagtgggagaaatcttgatgttttcttccaaataaaaggctctgcagctctgaggctgtcctgttggtgggatctatggatcgggtggcctgctggctgtctgtttatggagtacatctgtacagcagtccctctggtgtggatgtcagagctacaatccctctggcgtggatgtcagagctacaatgctgatgactcctcggctaaggacacacatgtggtttcagctcacagccatttctggaggaacacactggtccatcaccacagaagcgtgactattggtctaaatatagatgtgcttgtagcctcagagagacaaaagaccagaagtcaggcttccagttacttcaatgaaattttaaggtgataaaaactgataaatcaatgcttgttatacttgccacacctgtcaatttgatctaaagataaagctagggttacctcaaccacgtttcatttctcttgaccttagtggctaaagtcactcttagcccttctgacagcctcagcccactgcacgatattcctggcagtcctcatgggatacctcatgggtgctaactaagttgacagtaggctgtctgagcaggcacactgcatggatcctcatatcctcctaagtcctcctcagacatcatctgcagctaccgcctgcaaggtcatctcctttgaacaccatgggcactgggacctgccacattgggtttgaatgctgttgctgccatttatgagtcatgtgatttgggggcaggtcattagccttcctaaggtgcaatttctgttctcatttaaaaaatgaagaagaggaggagtggtggtggtggacagatgactcagtggttaaaagttctcgttgcttttgcagaagatctgagctcagttcccaggacccatgcaggcagcccatagaggtctaaaacttcaccccagtaaacccaacagcctcttctgggtaccccaacatacatggcatccgctcacatagacacatacacataatttttttttctttttttctttttggttttttaagacagggtttctctgtaggtggagacagtcctggaactctctttgaagaccaggcaggcctccaactcaaagagatctgcctgcctctgcctcccgagggctgagattaaagtcatacaccactatcgcccagctacacataatttttttgttttgtttttcaagacagtttctctgtattgttttggaggctgtcctggagcttgctctgtagaccaggctggccttgaactcacagagatccacctgcctctgccccctgagtgatgggattaaaagtatgtgccaccaatgcccggcctacacataatttttttaaagaacagtgttaactggtctaccttatgtgggtaactgtgatgattaaaagtattactatttataaagtagctttaaaaagcacctggcacatagcaagcattcagtaactaaaagcttctatgctactgccatggtacctgatggccctgggatgcgtctggcgggtcctgtcataaggtatcaaaaccttatctaggagttcatcgtgaagtaagagccaacctccttccttcttccttctgaattacgatgccaaggggataacaaagcaccccagcttataccccgagagttctgaatttaccaatgaaacatctgacctctcacctgctgcaccccctaatccttctcatgacacccacttccagaagacctaggctagaagacaagcaagagtgacaggcaccatgcattcctctcttttccagagctttactacggcgtcaagtgggctgagcctggctccagctccctcaggatgctccctcagttcttccttcatcttcagcagactccagagtccatcttcccaatctcatcaaagggtgaactgaatgctgaggctttgaaaagaaccaggcaccagctggactgaagtttggcagtggaaaacaactataaactgttgaagcacactaaatccaagactgacaaacagtactgatacaggctttcaatttatcgttgatgatgaagtacctgtccatagcctaaaactaaggcagggaagagaatctgaaaattcaaacgtgataccacttaaccttgataaaagatgggcgattcctatatagaaaaccataaagcattattaaggaggagagtagagatagggctggtgagatggttcagtaggtgaatgtgcttgcctcagaacccacagaaaggtggaagaggagaatcaattcatacaagttgtctcctcatcttcatacgcataccttagcatgcttatgcccctccccgatacaaacaataatacataaaagaaaagatagatatccatggggcacacacacttgaaattccagcacctgggagcatagccatgtagtaatagtcgaaaaataagaaagaagaaaaatgaggaagaaaaacaagagaaggagaactataaaagcagagaaatattccatgttctttttggggaggagggggttgagacaggttttctctgtgtagccctggctgtcctggaactgtcttttaaaatggaacataaaaagcacaagctggccaggcagtggtggagcatgcctttaaaccctaacccagcactcggagggaagatgaaggtggatctctgtgagttttgagaccaagccagcctggtctaccgagtgagttccaggacagctagggctacacagagaaaccctgtctcaaaaaaccaaagtgggaggaggacaactcattaagagatcattaaaagggaaagccaatcacactgtgggagaaatctacaaaaggactcaagcccagagtatacaatgaactccacaagtcagggctggggatgcagttcagtctcatctagcatgtagtaaatcctgggttcgatcccagcactacctaaaaccagaagtggtggctcacatctgcaatcccaggactacactcccagaagtggaggcaggaacatcaggaattcaaagtcatcctcagctatacagcaagtttaagaccagcacgggctacataagaccttgctttaaaaagaaaaattatacaaatcagggcctagagagacagctcatatgctaagagcatatacgactcttctagaggaccttggttcaattcccagtactggtacacggaagctgtctacagcttcggtctatgggatccaacacctcttctgctctttgtggataccaagcacatatgtggtgggtgcacttagattcatgaaaacaagcactcatacagataaaataagagcactttcaaaattccataaactgataaaaccagtaaggtagcagttttaaaagggaaggagtaaggcctgggcatggtggcacacctttaatcccagcacttgggaggcaggggcaccagggtctcttctctgtgagttcatggcttagactacatatcgagctccaagctagccagggatacataaggaaatcctgtttcaaaaaaataactagataaaaataggaaaagaaaaaaggaggggtgggcagtaaaaaaataaataaataaagatttcacaagagaaaatgagaatacgctaaaagcaaaacaggcatacgtgtacgtagtcaacaccagtcctaagagatgcccactaaaattacaactatttactactagcatctgggtaatgttctatttcacagtctgggtgaaggctgcatacatattcacttgaagaaaaaaaaaccaagttgtacacttaaggatttatatactcctctctatatatggcactttaattaaaatcattactaaaaaagacagagacttactacttcaaagaaatgtgatgtgggggacttgtttggatcttgcttcatacaacccaactgtttaaaagaattatggccgttgggggaattctgaacactaacagcacatttgatgataattaaggggctattaactgtttgtgtcataatggtattatagcaatggtttcgtttcttgtttatggcagtactgggaattgaacccacagcttccagcatgctacaaaatcaggctactgaggaggctgaagcagaaagatctcagttcgaggtttgactgggttacagagtgaatttaaggtcagtctgtacacactggagagaccttgtcataaaataaaaagtaaagcatgctgaggaagagattttagtggtagaatacttccctggcatatgcaagactctttcacccaatactggggaagcagaagcaggtgtagctccatgactgtgagtttgaaaccagcctggtctacatagcaagttgcagaccagtcagggctatgtagtgctattttgtctcaaaagggaaaacaaaaacaacaaaaaacaacccaagtggtggcactgcatacctttattctctgcactccagaggcagaggtaagctgtgtgggttagagaccaccagcctggtctacagagtgagttctaggacaaccagggctacacagagaaaccctgtcttgaaaaaaggcagggtggaggagagggaagagtatttggaggactggggagactgctcagaagctaagagcactagctgatcttgtagaggaccaggatttggttcccagcacccacaaggcaacccacaactgtctataacttcagttttatgggatctgaccatgtgttttatgggatctgaccatgtcttctggcttatgtgggtactatgcacagacacacagacacacagacacacagacacacagacacacacacacacacacacacacacacacacacacacacacacttacttactttcaggcactcatacacctaaactaaaaataaataaaatatttttacaggcatctttaccactgcccagctaactcttctccaagttgtttctggtcatagtctttatcatagtatagaaaatctatgagacagctccctttttgggagcatgcagcattctaagagctctgagcagcctggctgccccctaaatggcagctcccacagctgacctagcctacacatccccacaacacatcaagcttatgccaagtagctccatctcagtcaaatgtctgtgacctcctctgcaagctggccaaaggtgctaacctaacaagtatgagctggggtgggggcagtggtggcgcacacctttgatgccagcactcgaactcaggaggcagatacaggcggatctcagtgagtttgaggccagcctggtctacaaagcaagttccaggagagccaggactattatacaaagaaaccctgtctcgaaaaacaaaaaataagaaaaagaaaacaagtatgaattccccaatgaatctagtctggctttgtttgcaactccagaatcctaggcccaaacaacttggtctagagacagatgcaaacacaaaatagcctttgtggggcctcttaatttagtgtttctctggaagacttcagctatgagagctttcctacttataggaaaagacaattccttcgtgctctcatttgctactttctgatgtagtgtccagagttggttgaatctacaggttacacctggcttcgtgtataatctctaccaggcaaaacatctgcatccaattaggattccttggagaagaaagctgcatcttacaaagacgctccaggcaccccgtggcagcttttgaaggaagatccttgtagtgtcccttagtggtctccttattgactactaatcagtctggtgaaatggtatgggcatcaaataggaaaggccaaggcttcatttacacaaaaacacaattttacacaaggcacaaaaattaatttataggacttgctccattttttttcttttaaccttgaaggaattatacaatgacttcctttcatattctaccaacagctatctctgaaaagtagcgtatcatagggttgagtacccagttctgccatacacagactgtgtgacctccaatttcctgggctccagtttatcacctgtaaaacaggccaattgtatttcataaggctcatgggaaaagcaaataggacaaaatacgtaagccacttagaacaatggagttggctcttagtcttatttagtgattgtggtagctctgtagtgtgtgggcatctttcatcacaggaaagaaaggtaaagcaggggctggctcaggggataaaggcacttgctgccaagcctggggacctgggttccatccctagaacctctgactccctgaggttatctctgacctccacacctccacacaagtacaactgccctatcacacacaaaacaaaccaaatacagtgctaaaaaagaacaggacctggacaccaggcaacaagaacagtattgttccaatgctagctaaaccttacccacatttatttctgtgtcacagtatttgacaataacctagtattggaagcagacattatgaaataagagatcaaaggggtattgggaaactggacagtcttcctttcagaaatgcataaagcaagtttgtgttctgaagaagcaactcccaccactgtcaaatagaacctgcaagtccctcctccaacctagccaagggttccttacactagcctcaagaagtgcccagctatgttttgtaatgttgacaatcactggcattgtgacctctctcctcacttaaaaaaaaaaaaaagacccagggagattaaaataggacaataagatgggcattggtggcgcacgcctttaatcccagcactcgggaggcagaggcaggcggatctctgtgagttcgaggccagcctggtctccagagcgagtgtcagaacaggctccaaagctacagagaaacgctgtctggaaaaatcaaaaacaatgtatttatttcatgtgtacggatgtatgtgtgcctggtaacctcagaggtcagaaaaggggtcagatccccaggaactgtagttatagacggttgtcaaccaccacatgggtgctagaaacagaacaaggttcctctgaaagaaagagggctctaaactgctgagccatctcttcagtgccaagaacaactttaaaaacaataaactagaaagtctagacaccctttcaatattttgagacaggtttcactaagtagccctgagtagtctggaatgatgtagaccaggctggccttgaactcacagagaccctcctgcctctgcctcctgagtgctgggattaaaggaattccccacatgtcccatccaagtttttaataaacaaatacctacttcaaaaatcttcagttttaaatatctattagtctagtatctctatatggactgtgtatatatatttttaataaccagaatttatttaagtcataattgtcccataattatttgagttataatgatgccagagagataaagagtacatttgaactatgaataaggcaggctgcccaaagggcctgctgcctaagaatctatgtagggactcccagggttattcattatttacctgcttttctttctttgggggggggccgggttcaagacagggtttctctgtggctttggaggctgtcctagaactagctcttgtagaccaggctggtctcaaacttacaaagatccacctgcctctgcctctcgagtgctgagactaaaggcgtgcgccaccacctcccagccctatttatctacttttcaaagttaataaataagaatgtctttctgttctttatccacaagacggatctagccatgtgtgatggtgtgtatgtgtctgtttgtgtgactgacagtgtatatgtgggagacagcagcctgacagcataggagagtcagattacagcaaggagacccctgaaaaacaaacacagaacacacagcacagctttatctgttgtgtttttattaggattgacatctcatattttcatggtttttgagtattcttttaaaaacactagttgtttttttttgttttttgtttttttttctcaaaacagggtttctctgtgtagccttggctgtcctggaactttctctgtagaccaggttggtctcaaattcacatagacccacctgtctttaattcccaaatgctgggaacactagtgttttaaaagcataacattaatacaaaaaaagcaaatttacctatcatcttcataatacacataaactctgttgacacttaaaaatatattgacagttagaaaatttgaacagtaatgaaagtttcattctatccctctacagaaagccactgtctatatatttctgttctgccagaaatgtacgaatatgcacttactcatttcccaagaagactcctattatacagtatctgtaccatcccttccttgtacagcatggtatctggcttgtgttctcagcagccctggagacccctctgcctttcacagacactaaccttcagtgagtctctgcacccacaggctagtgtcacatgctgaacatgtggtgctaccccaaggttggcatagcaactataaaactactccaagcaatcccccatagctgtgtgaaaggaaaaactaatttgttagcgtggctcatttccttcagaagattccctagacataattatttctaccaaatgggtctctcaacagctggagacaactatttaaggaaaaggctacttttctctggggcagaggtggatgtatgctcactttgagttcaaaggtctctgtcttcccaaaaagatacacttggtgtcttcaaaccctgcttactgactggtcacttcgtggatgggtgtttgaaaagaggggggaaacaagccaagtgctggagagacatgcaccagacagtggataaaactgctcagtgactgggacctcctcctctcacaaaagctgacatgaagtatgacagacagggttgtctgaatatggctgcacacgaccaggctgaatggcagggctggggcaggggagtggctcagtccttagctcaacaataaagctacctgatatctccctcaaatccttcttaaatggtggaaggtttaaatttatcttgaaacatgtttacatggttttttgtttgccttttccaatctcatccatccatccaccaacttcatcaaacaaactgataggggttattatctactttaaaaaatgatattgtgggctggggagttggctcagtgattaagagaactggttgctctttcagaggaccagggttcaattctcagcacccacatggcagttgacaactgtctttaattccagttccaggggatctgatgccctcatgatagacataaaaacaccaacgcacacgaaataaaaatttttaaaaaatgacactgtgtctgagagacagtgaagtcaaatgacttgttcagaaccaggcaactgaccaagtcttctgactccaggacactcccatattcacccctgattctccccagcctaccctagtgcaacaagttcagcttgccactttatgacctcaaacaaagaaacagcagtaagagtcgtgtgtgctggtgcatgcttggaatgcctgcactccagaagataaggtgagagacaggagttctaggctagactgggcttctgtgtgctaaaactactccattctcatcaacacctaaatttaaatctggatagaaacataattattaccagttttaccaacacctgtgaaaatttactttgtgttttactgtaaacacctatatatttaaaacatcccaactttcaaaaggtttgatatcttttattttacttttaataatgaaaaatgttaggccaggtggtggtggcgcatgcctttaatcccagcactcgggaggcagaggcaggcagatctctgtgagttccagccaagcctggtctacaagagcgagttccaggacagcttccaaagccacagagaaaccctgtctcaacctccccatcccccccccaaaaagaatgagaagtgttgccttggaatatagcagtagtcacttgtcatttccatttcctgagttgctttctagtcaatcaggactgaaacaggtgggttttttttgttgctttctttcatatgtttggtttttagaaacagggttctggctgtcctagaactcactatgtagactaagctaatctcctcaaactcacagagagcttcccatctcagcctaccaagtactgggattaaaggcatgttccaccgctgaccagctgtttttcaaactcctaaaataaaaaaaaaaatctttttaagattcactcatttttcctttaaatgtgcatgaatgtttggcctgcatgcatgtatgtgcatcatgtgtctgcctgttgcatcccctggaactagggttacagatggttcgggtgctgggaattaaacttgggtcttctgcaagagtaacaagtgttagctgagtcatctatccagccctgaaacctttctgagaaatgaaaggcattaactttataaccacctcaccttcaggtgacttaaattatgcttgtataatttttgactttatttaaaaaaaaaaacactaattatagctcatcatatcaatctcacgaatgggtcatgacccatagtttgaaaagcactaagttgcattaagatgaatacacacattcggccctcaaggcattcgtatatttgctggcagtctcaaatatacacagtccctcgataacctgaagacccggaaaaagcctcagtgtcaatcacttcaataatctactgtgtagcagattctgcaacatccctgacagggtgacacatcctgaagcctttgctttccagacgctgcgggcaaagctgactctgagggtcacaatacagtttagcactaccaaacagacaggcaagaagttacctttcatttggtacctaccatagggctatatatagtccaatacaatagtgcagaaattaataaaacacctaaatatacacacaaccttttcctgagagacaatttggacttaatcctagacccagcatagtcttttgtaggaagagggaagagaggaagccaggagacaagaggtctcaaaaaggtcctcttcatgacctaatggagtgttggtgaatgagattatccgaagtcttcagtattggggagacccagtaaacagactcacagtaaaggctggaagtcaggaatggctcccctaagggggtccaaaaggagcagagtcttcacagagaaactccatacaatcagactggcagagaagataggaggtcttcagaagaaacaagcccagcacattcagggacagtaatgaagggctgacagagatggcaagggataaaacctttccataaataatatgcacagtgtacaatatgtagcaaataatttatgagttaactaaaaataaaataaaaagcaagaagcttttaagaagagagctagccaaaaagaaagactgagagataagaccagatccctctacggaaagcaagacaattatagattcttctactcttcgtgtaacatgatgtttctaaaggtttctgaatttgcaggatagtatttcaaaattacccatgggcaagcggagtgtaaactggtctctaaaaagacctagagttcacacaacaggtccccaatatctgttttactacaaatgaaaatgtgtacatgtatatggacttcagaaattcagaatattttaggagcagtcttggttacccaaatggaagaaaggctgagatactgagcttgggtgccaatgaaatcctacttagtgtttctttcatccttctccttttgctatggagcctggcctgtaattaaatggttctttccattattaaagctacagactttattcaaattaagctactgacttgatccatcctagagattactgggtacctactagattactataaaccatcttgcaaaaaagtaaattttgcctaaacaatagcaacctttatgataatgaagatttctaaagttaccatacagggatctggggagacattaactatctagtaattctggctctgctggatatactgtctgtgtcctatctacctcagctagaacgaaggtttgtttcaggtgaatacaaacacagtctgtgagtcaccttgcaattacagctgacacctgagagcatagttaaagcttgagaaacactggaagactctgccctgatcttcctgtctctcttccctgtcgcaggatgaatagattcttgacaaatcataggataatttttattgcacttctaaattgaaaagggctgcctccaaatacctcaaaattactgagctgagagtatagtaaattttagggataagatgtattgcttgaggctgttttttttttctcccaaaggagaaatcatcaagggtttcctaaacttccgagaaaacatctgtacataccaggtctacgtgttagcaatcatacacctgtaactgacgagggggtcctgaggaccattcaccactgagcaacattcatctcagccctctgctgccgtattcctccattcaagaaagccgcgtacagctcggtgacagtggaacacacccgtcacctgaaaacggcaggccaggatctgcctcgatgcctcaatcccccctgtctgagaggcagcaggaaccgggaccaaggcatctatctgatggaacacttaaaagaaaaacaacacagaaacagtaacactccacagccaagtgcgtgcgatcctctccacacccttgtaacttcttgccccaccagtcaggcagtggcggacgacttcgccttctcggggtggagcacggtctcttctgctcgctcgtcacctccccgtcctttggtgacacggatacaacaactgtgtgtgatgcttggctgtgggaggtcaagcgtttccaccctaaaaccgggccgtggctgagcccgggtgcagagagcctgcagccagccggcggacaggggcctagcacacccttgcgcttcaagttgcagctgcaaaaccaggccgcgggccggccggccggccacaccctggcccaggccggtgcgtctgcggtgccctccacgccagcgggccgctcctctccgggtcactccgggtgcacggcggggacacgaactccgcctcccagcccgccgcggggcctcgggggctggctggctggctgcgaacttactgcgggccgagctcgcaacaccaggcccgggcaccagggcggccctcggccggccagcgcggccgggctcgtgccgggccaccccgcacccggggcggggacccccccccccggcggccgtcgccctcggcccggccccgcggcctcaccccggctgccggacgcacacgtgctgggtgacagtcccctataggttccatacctgctgccggaagtgagcgaggagggcagtataggcatttcctgtgacgccagcgcccggactccattaagcagcagctgggggaagaatcaacacaccagggagcggagcggcgcgcaccgagcaccgaggcggccgctgcctccgccgccgccgcccgccgccgccgccaccgccgcctccgccgccgccgccgcccgccggggcccagcttcgggcccgcgccccgccggtgcccgcgagcccccgggccgcgccgcgagcgcctccggaggggggggaagggcccggtcctccttctccccctcctcccgccccgccgacccccgccgcgccccgccggcctcccaccacggcctctctcggcgaggaaactctggcctccgcttcctcctcctccgactcggacgccggcggagcctccccgcccccgcggaagaagccccgagcctcggcggcggagggagcaggagagcccggggcctcggccggccgagcaggcctcccccccccgccctcgccctcgccctcgccctcgcccgccgccgcctcctcctcctcctccgtggtggtggtggtgggactgcctccggccgcccccgccgccccccagcggagcagcggccacagcctggtcggcggcggcagcatgcaggccaacggggcgggaggaggcggcggcggcggggcggcgggggccagggccagaccccggagctcgcctgtctgtcggcgcagaacggggagtcgtccccctcggcggcgtccgcgggggacctggcccacgccaacgggctcctgcctgccgccccctccgccgctggcaacaatagcaacagcctgagtgtcaataacggggttcccggcggggccgccgcggcctccgccaccgccgccgccgccgccctggctacccccgagctgggcagcagcctcaagaagaagaagcggctctcgcagtcggatgaggatgtcattaggctcataggacagcacctcaatggcctagggctcaagtaagtgtcgtccgtcctgcacctggcgaggcccgggcccggccgccgggagggttgtgggggacagacagctccggcagcagcgggagggaggccgagggaaacgaatcggcccgctgtctgctgtcgggagacgagctggaccgcctgggctggggacggacgggtggtggcagcccagagcgacccctccccacgcacctccagagcccgatcgtcgtcggcccgaggaggcggacacccagggtgttggtgctgggggaggggtggctcggagcggtggaaataatgaaccttggaggatttgtttttcaagtgtgtctcagaggcatctttgtgggacacctccccacccccacccgtgaccgacaacagcccaggcaaactaccaatcaggaaggacagtcgcttacaagtgtttatgggaactaaggggctgggggtaatttggaaagaggctgtcgagtaaatctgatgggaataatacggagttgaagtcatgctgaggctgtgtgtgtactaaaggcctagcactggtgaaatcccatttgaaaaacaaccaagaagattgcctctgaaaaagtgatgtctggtctggtggatcatttgttttcaaatacagttggggtggcctttaacttatagggtgaaggtagggcatcgggtttaaccaaaatccactattttgtacacacacaaaggaagaactaagggagtgttgaagtaaggttggtgggagtgtcctggagctgaatgaaggtgtcagagccagaaggagctgactgggtaaacatgcaacagtttcctagcctcaaatttaaaataaactcttaggcttaagtgtcaaggtggttgttgttgtagggtgtctgtgtgtgtgtgtgtgtgtgtgtgtgtgtgtgtgtgtgtgtgtgtgtgtgtgtgtacacgtacgtacgtacttgttgggaaatggggacaacagcactagtgacaagtattttgattctcgagctgggcattgcactgttgaactgaaaaataaggagcactaaagaaacgaataagtaaagccatgaacataaatatacgactgctgaatgaaggttttagataacaaagttaggtaccatttagataccaaatgaaaccacatttgatgagttaggctcccaaagaaaaatctggaaagatttcactttagtccctaaaggaaaagggtaagcatgaaataaattttgtgaatgctaacagaacatattactgagggaagcagcaagctgacagcagcaggcggaaataactcgtgactgtttggaatctacaccatagtaaattggctatttttagtatggagagaaaggaaatggtttttgatgctggatttgttttaattttgaagattgacctagcagaatttacatacaagcaaaatacctggaagggaagctctacctaacacaggccgtctgtcaccttgtgttctgtcttccaaaatgctgtgccatagatgatttctagattctagtttttacttgaccagttggctagagcacatttttagaaattgtatactcttttaaacttgtgaaacattaaatggcagaagtagggagaagctagttatggtttcaagaaaagtttttaagtgtaggtggcattttaaatgatttatttaaccaagtgttttaaagctcttttcttctttcttctttatgatgttgtaaacactagtgtattaggaagagtaaatccctaaagttggtcaggtcttttttacactgtatctctcctgcagccagactgttgatctcctcatgcaagagtcaggatgtcgtttagaacatccttctgctaccaaattccgaaatcatgtcatggaaggagactgggataaggtaaagtagggcatacagagctgtatgactgctgctaaaattaggtatttgatggaaattttgtgacatttttgtttttcttttatgccaacttttgcaggcagaaaatgacctgaatgaactaaagcctttagtgcattctcctcatgctattgtggtaagaggcgcacttgaaatctctcaaacgttgttgggaataattgtggtaaatacacttttgttcttagtttcacacttatgcttattttaggttattgataacttataggcatctgattttaagaggcttgaaagtaaatttatataatttataaataaggatgagttgtttatggttgtaagctatgaactttaaatgttttatgtcatacttagtaaatgtgtaatttgaaaccataatttaagccctataaaaacttgaacatcttcctgcttttagtgctgttaataggagccttatattgttaggtaaaggctaattatacttttatattgctcaaaatattgaatatgtttgttgaagagaaaatatgtttgggtttgtgtataacataccagcatgaagaagctggtatgttatttttttggtcattggaattacatagtcaagccaaatcattactgttggtgtgcccaccattttcttccattcaagttacatgcattgacaagtgtcagagtttgtataatgtgtgtcacttggagggatttaggtgcaggtttgatcagtgggccctgcttaacgtctttattttgttaagatgagtttaggagtttaccctgttaacttccttcattaacctttatgggtttggtttggttttttatgctgataagttttaattctttaggaagggatacattgttttttaagcactagtgattgaaaagcttggaagaatcagttgctggcttataaacttatagctgattgatttattgtcaaaagcagtttcctgtctggtggggagggaaaggaggagactaggaagtagagtagggaagccagctgttgttaaatattagtgagtgaccattagcattttggttctttttttaaaattgggtcaaacattaaccttttttttaacctttgtctataaactttaatggagttgggttttttcttttaaaaaattcttattacaaaatagtttcaaattcttgatataattctgtataataatataatcttagaaagtgggctttaggaaaattaaaggtctaaagaagtatgacagatgtgtagttaaattcatggttctgttctttcaataaatacccaaagtattaaaaaatttaaatgagtaaaaagtcaaatgatttaacttaagaaataaatagttccatagaataatttaaaagtaaaagtgagctaaagtaagcatacatatttgaagggattaaatttttttcaggaaatagagatgtcctcaattgttatgtctggggtttaaaccctgaggtgggtttttgttttttttgttttgtttttattttttgagacatggtttctctgcaacagccctggctgtcgtggaactcactctatagaccaggttggccttgaactcacagagacactcctgcctctgcctccttagtgctggaattaaaggcgtgtgccaccaatgcctggcacctgagtatgtattaattgagcagtttttcacaaatttttggctgaatgatctaaaacaaaacaaagtggccaaaattagaattgggatttattggtggctataaagaaatttatttgtggagtattttggtgtgatttattggagtgtgttttcattttttttttaaagtttatccaaattgtatctgtactctgatagcaaaaaatttaatggattcacttcttttaaaattttatttgtagtaatttgagacttctgcttgggtttagattatgactcattagaaacttcaatagaagcaacatgtaaattggagaaaggtagttatagataataaggaggaatcctttctttttacagcctgttgagtctgtagaacattctaggatctaataaaagatgaagattaaatctctggctgagcctcacaccatcaaactgtttaggtatttatacaaagaaaggggtccaacttttgtctcccataagcattgatgaatcaattgctttaaaagattcagttcagcattttttgaagccgttcttcacctttctaatcccatttattccttccagacttcattgctagatgatcatttaatataatgatgttgaaatttgtaatagtatcttagaagacagctatgtgggcttttaacgtaaggacttaattacctacgcagattttggtggcagtgcagtctcagactgcccatcgccatcatttccagtgatgggactgaagccagagcctgccttgactgggttagcctgtgccctgccacttagctgcatccctggccttcagactgaacttttactttttaaatctgaatgtttttattgctctagtttacttccctcacttttcctctgtcccccacactttaaaatggttttcagtcaaatgatacacagaagagcagatgttgtgggttttaaatgctaaaatcatgagtttgaattgataatgccatgtccgggcatctggatgggcatttgaaatagttttaacaaaaggagcagatatggacttgacataaaaattaactcataaagtcaaataagagctttgagatccttagcataaatataatttatttctcctttccttggattaggatttaattggcaaaatttgcttataacattattatagagttaaagccatcacaaaattaggagattcccctccatggagacactaacatttgagtttttcttcagtgttaaaattcagtctttaatgtgaggagaagaatagtgattcagatattgggtaaggcttgtgtgtgttgggggtgggggtccaagaagaaatttcaattttgggtttttattagattttaaaggaaagaagaaaatattgctggggcccaaagtcattgaaatatcatcagtgacctgaaatagtctgatgaagatctaattggaaaaactcaaagagggtgttatttcctccttccttttcctaccgtctggcttcttttagaagcctctgatgtttaaagcaagcttcagtgttgcctgattttaaacttctcaggaatgaacatcactggcgcattaaagggcctttattttcttgatattatattcattttgagctttaaatttaggaaagtaaaatacatcttcattgctactgtgtgtcagatatttgagctgagtttcagatggataaacatttttttctcaagctctttagctgtatttgtctagcagcatattagttgcagtgccttaagcaacctttgagggtgttcattgtcttaatttggataaaatgactcataaaaatgttctggtgttgcttttatagcattccctgtatatacaggaatatgtgtttgtgttggctttgctcaaaggtctagtttgccttccttttttatctttactggtagaatgcagtaacattctgccatggtcttgatgagaaagtacgggagaaataacaatgggcactgtccctctacacactgggacaagagaaggagaggttaacactgtccatttacacactggaacaagggaaggaggagtatagggcctttcgattaatagtaaatgagcaatgatttgcctggaattaaaaggaaaaaatgattcccaaattcccagttgctgagaaaatttagtgaggaaatgaaatccatgctgactagttgcatgaggcattgcttaagcttgacttaaaaatacactaagttaatgaaaccttgaacagagtgttggtaacatagaagctttattttgtaaaattaatttttttcagaagatggtgacaatagcctagtaatttcacatataatgcccctcccctttctaagatttttaaatttaatttggggattttgtcacctggtgaacttctaagtttttttttttttacttgacatataaaattaaacttaaggatacatgtacaacacccttttcaaagcatcttgctaattaattagtctgtttctgaaactgattagtctaaccttatgtgtaaaattggtaagtgtgatttcctagttataggagtatgtctcagtttgaaaagggttttttgtttgtttgtcttacctacaactttaagattagattaccaaacagaagtaacaggtctcacaacagatatgttttaaatagttgcctggtttatataagagggtttaaaataacttttgtatttgagacacagtagaataagccaatagtttatatcttataggtactacttaaatatagaatacaaagcagtttattgtgctctgaattctgttgttacatgttaatttctgtaaaccattttgtaacaacttttttttaaaagtggactttgctttttcacaatccatggagcttctaaatgtgatgagcattttctgccatgtttgctgaagcacaagtaacaaatgtgagatggtcctccaaacagaggtccttagtcaagctgcaagcatagaagacattctagatagaatagttggcagctactgctctgtctagtggaaactgctagggttgtggtcatcatttttaagtttagagtaagatgataatgtaacattagaagtgttaaaaccaaacatttctcataactgaaaagtgctttatttttgtggacaaatatttatctgtgctttgttgctaaacacattagtgagcagattatgacaaaatatacagacatagtagattcttcccaaaggccattaaatccagccctctcctgtctgacagcagctttctaactgcagagaaagctcatgctctcccggtttagtcacaggatctccaaacttttgcataccaacctggagtgtgcctctgttagaaagcaggttttacttgagataagccaaaatctggtactttcatactaatacctaatgactttagttctaccttccaagtcaccttagtttctctttcatattgtggctttttttttttggtttagggtttttgttgaattgttttttcattgttatttttgtggtgctagaatcaaatccagatctctctatactatgcaagcgctgtacaaatgagctacacccctgctgcatcatgcctttccaataactcttccattaactggacttttttttcatcagtgttttcaaagcctgctgcataagattttttactgccctattaagatagtcagaaaatttgaaaagcaaatttggaattcttggaatcgttttaaatgttgataaataaaattttaaagaaatgtaagagcagaattcattttttgtttgttttcccttcttatattgataatgccttagtcactaatgatcctgactggaaatttttcagagttttattactatgtagacttgagcagtcatttaacctactatgactcgtaaaagaaaaatattttgagtcatcttgaagctttataaaattattttcaaaaggcatagtagaatggtttctactgttctgtttaggcacaaacattttctgaaacttccgtcaacttttttccctgactgctgctttctgtcatgtcagaggatgaagtttttgctgctgcagcagaagtacctggagtacctggaggatggcaaggtcctggaggcacttcaagttctgcgctgtgagctcacgccgctgaaatacaatacagaacgaattcatgttcttagtgggtaaggaagtggggtcttagactccagattcattaaggggctaagatctttatagacagaagtttactgttggtcagagttatggttcgttaattttttttgtgtgtgagatagaaagtacctggatgttgctaaattgttagttctggataaattcatttatgtgtatacaacctatttagacagaggccagattggtctctatagagcgagttctaggacaaccaggaaaccccaatctcaaacaaatgaaaacaagaacagaaaagatttgagatacttttaataggtgaaggggaaaaaaaatccatatagccaaagataccatttcaaaaacttcatggttttggatcacagcaagcagtggagagcagacaagtgctctgcatacaaaatcagcagttgcttaactgcttagaagcatggtctcattacatggtgtataattgggctggttacaactgggtggtggtgacacacacctttgatcctaacattcaggaggtggagacaggtggatctctgaatgtgaagccagcctggtctacagagtgaatactaggacatcccaggacacacagagaaaccctgagtgtgtggtggggagatccacctgactctgcttcccaggtgttgggattaaaggtgcacattaccacatgggccagaacttataatttaatgcatagtttttattttgaagtgatcttgaaagaaaataaaattcctgcttgtgctatgtcttttcagttctaccatgttactttccataagtacatttgtctaaatccaaggcttactgcatattcttgtaaagagcacagaaacaaccataggtcctcttccttacttactgggattgaacctatgactttgtttggggttttgtttttattttggctttttgggacagggtttctctgtgtatctttggagcctgtcttggaactcactctgtagaccaagctgggctagaactcggagtgccgcctgcctctgcctcccgggtgctgggattaaacacatgtaccaccacacccccattttccactttgtgtggtgtgtatgcatatgtcgagatcagaggacaacttgtgtgagtagttctcctggcttgtgggttctaagaatcaaaatcaggttggcaggcagacttgtgtttaaagagccttgacccacagagccctctctcttgctcctcataattagtttagagacaaagttttcctaatatcaagtataattacactttctaaaaagttttttcattaactaaaatgctgtatccatactaaatagaaaggagacgctcctctgtttatttagactctgtgatcctttcttcagttgaggaaaggggggcggggggcattgaccctgctgtctgagaggggtcactgccttaactgtgcagcagggaacttgtagttcacccgtgttgcctgattgccctttatataagtgacaagaaaggtatatttggcagagcacctgggagagttagctgccagatctcacctatcagttgaataaggtctgtgctgcttttttgttgttgatttcggtttttgggggggttgttttgttttgtttttcacacagggtttttctgtgtagccctggctgtcctagaactcactctgtagactaggatggcctcaaactcactgagatctgccttattctgcctcccaattactctgcctcccaagtgctggtattgaaggcatgcgccaccaggagcctgtacttcttttgctcaatcctgttcccctgagaaaagccaggtttggaagtatgttctctgcaggaacatacttagttatgggcattcagtaaagtgtgtgctgaggatttggaacgtaacatggcacaaagtaagctacatatatataacagtagaagggagtactcttaattacagtgacaatattgtgtatttaagggaatagtctattgccttttaatttatgagggtacaagattgtattaataaatcgaattcactccaaaaaatgtttttcttgattggtgtaagcaagaacttgattgtgaaaatacaatccgctgttttcaattatattccaaagaaaagtgtttgagatttgctgcttactctgttacaggtatctgatgtgtagccatgcagaagacctacgagcaaaggctgagtgggaaggcaagggaacagcctcccgctccaaactgctggacaagcttcagagtaagagatcatttttgatatttatttcctcctagattgaaggaaggaatatagatcaaataggaagcttgtgtttagacacagctttgagtttttgtggaaggaatccattaagaagtcctttacatggaggattctcccactcaccagatgtgatctggagtcaatgtagaggtgctggactcgaattctccttgcttttgtattctttagtcatgctcctaagattttctttggatgaaaagtacaatggttagaggaaaaaaatgtaaaccacagctgtaagtcatatgcattttacagtttttgttcgttgttttgtttagtagggactggatttcttttttttttttttttttctttctttttttggtttttttgagacagggtttctctgtggctttggaggctgtcctggaactagctcttatagaccaggctggtctctctgaactcacagagatccacctgcatctgcctcccgagtgctgggactaaaggcgtgcgccaacaacgcccggcagggactggatttctttaggtaaattgttttatgcttctcccagctgtgtttgatcactttcaagttgtgttggggagggatttcatttttatcatatctttatgtaaaatacctcctttccattaaaaccatgctgttatgttgcagagagtggaagtctcaagaatcagaaaatacatattccacatgcttgggagaaatgtaaagcataagagtatttagaataagtttgtatttattttcattctctgaatctccacagtacccttgattctagtagcctcagtgttttggcttactctttaatttttcgaggcagggtttctctgtgtagacatggctgtcctggaactcactttgtagaccaggctggtctcgaactcacagagatccaccctcctctgcctccctagtactgggattaaaggcgtatgccaccactgcccagcttggcctactctttgttaactgaagatttatcttatactgattgtctactgatacataatcatcattggattttctatccattttctttttacttttgtcatgtgtttccatatgtggtgttattcccctcagaaactccacctacaggatacggccagtatattcctttttagtggtgatatcactgtagcttttgaaaatacttgcctctccctagagcttgtctatgtaaggaaacaatactgaggtaaaaggtacaacagaagaggagtgaatgtcttaaataaaagtttacggtttattattatttttatttctcttttttaaaatatcttttattaaagcctatttaccaccatcagtgatgcttcccccacggcgtttacagactctcctgcggcaggcggtggaactacaaagggaccggtgcctatatcacaataccaaacttgacaataatctagattctgtgtctctacttatagatcatgtttgtagtaggtaagaggaaattttcttatattttcaaatgttagcattttacagaagaaattatgaactttatttgaacattttctagggtttctttatgtagctttcatatttgatttactgtttattcacagtaaaacccaggactactaaaactgaaacttacataagcctatgtttatatagtaagccacagttgggagctgaagcccaaaagccaatttttttgtgttcttactgtgggtttggttagtcattttctatgttcaacagtttaactatgtgccaagttattctctgcatatgaaaatcattgaaatactttttccttagtggaagttctgctttttgtaaaggaagagcttcaaaaatggttcgaataataggcattaactttgtgtttattttttaccaaaccttgcacataattgaagttggaagaattcaagcttgtcttttggtgttaagtattgtttagtaaaaatttcggtgctattttaatgatgctctctaaaattaaatcataactttaaatttaaaaacaaagatgaaacttgtgagccctttcaaactgcagggaagctgtgatttggttctgaccagccacacgccacaagcaggctgctgtaatgtctgtccttctttcctcctgacgtcactgaggagttaatgagagcaatgatgatgggcttgtagtaaggggagacagagtgtgtctgttcatcaacccggaacttttgagtcaccataaatagtaatttaaaacaatactgaggactgtttattatttatttttaaaaatttatgttttatgtatgagtgctctgcatgtatgcctgcctgccagaagagggcatcagatcctattatagatggttgtgagccaccatgtgggtgctgggaattaaactcaggtcctctgtaagagcagccagtacttttatccaccaagctatctctccagccctgtgaggtgtttaaaccaggtgttttactttgtttttgtttttgtttttgttttgttttattcagtgctggaaatagaacataggtcccttcaaatgccagtcaaaagttctaccactgagcctgtccccagccctgtcatgtgctgtgtgtgtagttgtgacattactcactgcacttgtaagaagaaaacttgtttgagctattggccttggaagtgatgctcatcttgaagaactggcccacgatttggtgtgagtcactgttctgctgggatgagattaacccaactcactccctggcatggttcttggacttgtttgcgagaatttttaaagcttttcatttaaattgggtggggatagattacaaggcaccagtcccctgttttaaagctccttcctttaggaggttgttaaaattaaggcacttatagaccaaggtcatttctgctatggacactgggaaataacaagtagatctgatggtaccagagtttcagaaagaaagagcctttccttcctgtgcagaaacagaaacccatgagaagaggatttttttttcccctgtatagtctacctcctccatccttcacctcaggggtgggctgctggctcatcagccccatgtataaagcactctaaccacaggggtgggatgctcgctcatcagcccatgcaaaaagaactcttgacattttactaggattgaaagagtttggcttttctaaagtaattgttccttgggtcttctttatgattaaaaaagcatgcacacacatggtacacaggcgtacttgcaggcaaaacacccatacatataaaagtaaattacaaatgcattccttctgtttaccacctccctccttcaaaaggcaacttctcaaatcattctcctctgtgcaagtctttggtctatgtccttgtttttcttcactggattcatgtactgtcaatgctgatgttggtgaggaacagtctttttgtctgtttaattcagcagctgttttccagtttatcttgagctttctgtagtattatagctttctgtaaatattccagattctggattgatgttctgacccctcccagggttcctcttctccatctgtcctttaatcgtttgttccagggttgcttcttgcctcatctttcttcataggttacacttccatgaatctagtgcctcctggaaataggccagagccacagttttctctcctgagcttagatctgagtgcagtgtggctgttgctctcggtaaacacagcagatctaaagagatttctctgcctcttactcaggcctgttaagtctggcttttatacttgagttctatcttttttattttatttttcacatgtatgctgtctgtgcttgagtgtatgtgttttcacatgtgtttggggggtacatatgtacctgtgggtgcatctgtgtggaggcccaaggttgatactggaaatctccctcagttgttcttctactttattcttttaagacagggtctctcgctgaacctggagctcaccaataccagcaagtctctagccactttgctccagggatcccctgtctccaccttcagaggctggaattacaggcggattaccatgtcacctggcatttacatggggctcggggcatctgaacttgcttgcttgcaagaacttcagctgccaagccatcttcccatccctgcattttctatctcagggaggatctacctacccatttcaccaagccggaaaccaggagccgtccccagctgttcattctagaggtagatttttaaggagactaagagagtaacaccaggcattaactcagtaagttgtcccttcattgccagactggaaatagagcctgaacttaagtccttaagtttagctggaggtcttcaaaagaaaagttgataatttttaaccatctgttttattttcttctagaaactagattttagcactggagctggaaagatattttctgaaatttaatgtaaacatgctatctattctttactctctggagaatagaaaattgattatgaatagctgaattataatttgaaaaccccatataaactgaagtgtttttattaggttgtacacaattgtttttcagctggtgtgcacatatttttggttaaatgtgaccagtaaagaacaattttcttttcttttttttttttttttttaaacagaaagaattttctggactttttatactgattactgatagaagtgtgtttttatatgtgtttttttttaagtactagttttttagtataggatttttataaaatatttgtagccacaatttaaagtttgagtttagtcaaaatgctacatttactgttttcttttatacagtgctggtttttaataccatcttaagttttaaatttatatgaaagcaaagtcatgattcatgtatctgaaaaaggctgtgataaatttgcacattactgtagtcttcatttttagtttggtttttttttgtttttgtttttgtttttttttagatttgattttatgtgtgtgaatgctctgccttcatgcactgtgtgcatgcctgtttcccacagagcccagaagagggcactggctctcctggagcagttgtgggctactatatgtgtgctgggaaccaaactcctgtcttctacaagagcagcaagtgctcttaaccatggagccacctctccatccccaccttagtcttagtaaaaggttaaatgatagtttaaaagtgactgacagctgtcaataggttaaatgatttatgctgtgtaattttaagtcggtccttacttaaaggttgtttgctaatctaaatgaatcttttctattgtggtcaacttcaggcatatgacatttttattgaaatcttactggtctttgaaaagtattaaagttgacatttggaaagataattcagtcaattataggttcaaattttagttcggttaacaattttatgaaaatgtggtaagatacttgactcttggggccttgtgaaaaataggggtgttaaaatttctcttgtcaaactagtttcaagaattagtattctggaggctggagcaatggctcagcagttaaaagtagttgttcttgaggaggacccagatttggttcccagcaccctcatggttaacaactgtctatagctccagtcccagggcccagctctgttctctggcctgtgtggacacactgcaaacaagtggtgcacagacataaatgtgggcaaaacacccccacacacacacgagaagacatagaatagaatcattcattgtgttgtttcagagtaaagtagtttgtagttaagtaatctgggcctaactgtagctagccctaaggctggtgaattgacagcatgtacactccttccctgtgtacgtgctactgcacactctcttgccatattgcccatgctggtctcaaacttttggtctcaattggtctccctaccagaactaggactatccgctccctctgctgtgctgggctctcattacttactggttggggaaaaaaaatggagaagactgttgaggtcttttgaagataagtttaaaagtgtgacttgggcaagatcaggaagatgggtttcatgttagcctaggctacagtggtaagaacaactctcaaaatggggtaggagggctggagagtcggcccagcggtaagagagcacttggcacttttgcatttcccagctccacctccagggaatctaataccttctcttagcctccacatggtacagaggcactcatccagtgcacatacaaatacataggcaaaacactcatgacgcattctttgctggagttgttttactccttcaatcatgtttgtcctaggaattaaatttaggttgtcaggctttacagcaggcacttttacaaacccttgagctatcttgctaattctcatcatttattagtaagtgtgtgcatgtgtggaggcagagggcaacttcgggagtccgttctctccactgtttgggttctaggatggattgtcagctgttcagcaagcatttttacctttgagccatctcactggacaccccccctttttttttttttttttttggtcatactaatagcttagctgattttatgtgcttgaagatgttgcattatttcttattctttataaaaccaactaatgccattcatttataaagtgggtaaacataattcctgaataataagtactcatatgaattgccttaatcaaaccaggtagccttcagaaggcagcaaaaaagtaaactttaggttgaagtagaatttatattacagattttaactaaagttgacttgaacaaaaagtacctgatgttgtagtgttttcatttttcaacataccaaaataaattttattcttgagaattgtaaatgcattcatatttctacttgagaactcctattctaccagttgttaaatgtccttctcattattgctaacaatgctttgaaagagtaattgtatgtgggtttgtttgttttaggaggcagttcccctgttacactcagcagatactcacagagcattgtaatgaagtgtggttctgtaaattctctaatgatggcactaagctagcaacaggatcaaaggatactacagtcatcgtatggcaagttgatccggtatgtaatcctggatgagttcttagattgatttattttatgtgtgcacatcacgtatgtgcctctcctgcacaggactgagggtgcatctgacccagagttggatgattgtaagccacgatgtagatgctggcattcaaaccctgctccttttacttttgagtcttaactctctagttatttttagtttttcaggacagggtttctctgtagctctggctttcctggaattcaggagactaggctggccttgaactcagagatttgcctgtgtctgcctctcaggtgctgaggttaaaggtgtacatctgcttacctatttgtaatatacataagtataagcagtagtcttctgcaagtgtcttttggtcatgtttgtcatttgatttttgttgttgttgtttgtgtgtgtgttttgttttgtttgagacaggttctcacttggtttcccaggtttgtctaaaactcaagtcccttctgccccagccagccttccgaaacgctggacagatagaaatgtatcatcatacctgactctgatcacttttgtatatatttgtctttttctgtgtgtggtgcttctttttaatgtttgtaggttaatattatcctagttgtttagtgttgtgctaaattgtgctaagtcattttgccttctttaatcctctgagtgactcaggtgctgagccttttgtgttgaagtgaggaaactggggtaaaagtgttaaatgccaagtataattcatagatctcgtgtagtcttgcctggttttccccaatgatttgaagattaatgcatgtggattttgttttgttttcgagacagggcttccctgtggctttggaggctgttctggaactagctcttgtagaccaggctggtcttaaactcacagagatccacctgctaccaccacctggctaaagatataaatcctaggcttgcttgttttggtttttcaagactgggtttctctgtgtagctttggagcctatcctggcacttggtctgtagacaaggttggcctcgaaccttgtctacaagagagacaatgcctgcctctgcctctcgagtgctgggattaaaggcctgcatgtggattttaagtgctgagttttctccaatctgaattgtctttatcactagagaacctacagaggtgtagaaataagcctgttcatttctttcaaccaacatttgtccactagtcaaaaagagcatgattccaaataggctatacatgttttaggagcctttcacctaagatgtacataaaacttgatttagagctaaaacacagctttttgcctctagatacatagattggccctcaactttattttgagcaacacaacagagtagtcttaggagccaatatgatggctcagtaggtgaagaaggcacatgctttgccagcctggagaccagggtttttttttttgtttgtttttttttttattccctgaaacctacataaaggcggaaagaaagtaatgactccacaaagttgtcatgacatgtaggctgtgtgatatgtgagcccactcaaatatcatccacgcacaacatatataacaaagaatttaaaggcatcataaaaggaaaagtacaaactagagacaggtacttcttgaataccttcctgtggcaggaggtctttggggctggggaggtaacgcattagttaagagcactagctgctcttccagagcatctgggttcaattccagcatccacacggtagctcataactccagaatccaacaccctcacgtacatgccagcaaaacaccaatgcaccaaaataaaattaaataaattacatatataaggcggtcttccttttttgtaccccaatacctagctagcaatctgacaaacttactggtcatcttaaaatcatactgttagatacacaagccaaaatacatagctgccacacccctctgtgtgtgtatgtgtacatacatgtatgtaaacatataataccatatataatataagttatgcactaattatttaagaaacctaattatattgaaatataggctttcaacctagaatgaaaaggtatattattcctttattaaccctaaataattttagtagcagataatgactaccagcattctatttttatttgtttttcccctgagactgggtttctcagtatggtcctggctgtcactgtcctggaactcactttaactatcggcattctgcatttctaaatttaaataatattgtaagatatctgtagcaattagaataggaaatgaaagtgtctgaaatatctttaatgttgaggcataatactgaatttactgttacctaatgtactacttaatatttctacatatattgcatcagtttaaatgcattagtgatagattaagtcacggataattcattggcatctgtcttaatcagggttttcattgctgtgaagagacaccatcattacagcttttacaaagaaaacatttaattggggtgacttacttacagttcactatcatcatagtgggttgttacgagaaattcttggcccagcaggttctgccacccttgagccccaaataaacacagaagctatattagttataaatctgttggcagtgactagggcttatttggctagctctgtcttaattatcaacccatttctattaatctaagtatttccacgtggtcttatcttaccagagaagggtctggacctctaactcctttggcggctcacatgacaattctgtctgccttcaccggaattctcctcctctggtagccccgcctatccttcctgtctggccactagccacacagtgttttattcatcaaccaataagagaaacatatgcaggaggacttcctccatcagtgggacatggcagggtgcaggcagacatggtgctggagaaggagctgagagttccacatcttgatcagcaggcagcagtagagtctgtatccacactgggcattgcttgagcataggagacctcaaagtcggcccccacagtggcacgcctcctaatagtgccactccctttgggggtcattttctttcaaaccatcaacacatcatccattaaggaaaagaaataataagcacttttccttggagtaatttaaccaacaatgagccccattttaattttctacttctctcttcccctagtgtctctgtcactctagtctgtctgctgtgtgagtctgaatctgcttgctttaatgctgttttgtgagtttgccctaacaaaggcatcacatggggaaggaataggcaatacttttacagaaatcttttttctatttagggaacaagcttgtttcacatgtaagtcccttctctctctccctcccctcacccccatcactcctcccccatccccagcctaccccccaccccatccacccaccactccccaggcagggtagggccctcaacaggggctctgcaaagtccaccaaatcttcctgtgctggtcctgggcccttccccatgtgtccagggccagagtgtatcccttcacgtgggatgggctctcaaagtcccttcttgcaccagggaaaaatactaatccaccaccagaggctccctggagtgcaggggcctccttattgacatccatgttcaggggtctagatcagtcttgtactggcctccccgacagcatctggggtcgatgtgttctcccttgttcaggccaattgttcctgtgggtttctccaacctggtacagaccccttcactcttcattcctccctttcttcaactatattcccgatttcagctcagtgtatatccgtggatgtctgtctctgcttccatcagccactggatgagggctctagttcctggatcggtcagcggaaagggctacagaaatcttttaaccgagttttatacaatgaagccactgactccaactgacccagatagcaaaggctatcaagtaataatctgtatagtaaccaccatttacggtagatattttatgaaatttcttccatcctattttcagtaaatgattatcatagcatacagacacatgcattactttggggctggcatggaaaagcacataaaacatcagcttaaaacattagcttagtgtgtgaaagttaattacaattgtttttgatacagggtctctgtgaagccctggttggcctcaaactcatatccacctgcctctgcctctgcctctgcctcagcctcaggagtgctgagattaaaggctttgccaccatgcccatttactttgttctactaaaggtaggctaaacaaactgagtacacagtagagtcccacagaagtcctttagattgtaggagatagtttataataattcatcaccacagtatgctaataaactaagtgctgttttgttacttgcctacactcaagatggagggaatccagggattggtgcacacctttaacccccccagaggatggagggaacccagggattggtgcacacctttaacccccgcagaggatggagggaacccagggattgatgcacacctttaacccccgcagaggatggagggaacccagggattggtgcacacctttaaccccagcagaggatggagggaatccagggactggtgcacacctttaaccccagcagaggatggagggaatccagggactggtgcacaccttttaaccccagcagagaaggaggcaggtggatctctgagttcgaggcctgcaggcctgcaagaaacccagtgtttttgtttgtttttgaacaaaacaagagatggaaggaagtactgaatttgaggcagtggttaatttcaggcagcagtacctttaatcttttgtgttccaagaccttgcttctattcatggaatctttgttgtagatgtcagattaagagccctaccaaagggttgcacaggtttgcaaggatgataaaatgcagtgaagtaacattattgtgcttctattcaattgaagtattatgaggacataaatgagccttgtaagtgagcttcattagagctttatgatggtatagcatacaaatggagcaagagaaggacattctggtagaaaaggagtatggcttgactcccccttcattgaaatataaataggcttatttttattaatggcaaggagtcacaaataacactagaaaaagaatttggaatcaacacacagccttgcattccaaggggttttgttaagtttgttttttagtagttgtgtgtgattcccgccagatttatttagccagtataaaattcctattgtatgttaatttttttaatccatgaagctaagcatatgataataaattctgatgagtctataatggacactgtgggagcttagtagagatcttgttacatctagaaagctaaggaaagtaaaaaaagatcaaagaactgttaaggtgaagatcaggaggtgaactaataaagcaaatcttttctatcttttgctgaggtgtttagaattgtgggccagtgtttcccagaatgtaatagatgttcattgtaaagaacttttttcttcaccatattaattaagaaatgcaggattagtatttatattctaatctgaagtgtgaagaatgatttttagatgtctgtgctacaaaaaaaaaaatcccctgagactggtaaactcttggcatggtggtatttttgttatgtcaaatactgtttagaaaagttgagtatgctctttgattttttgtttggttttgttttgagacaaggtttctctaacagccctagcaggcctcgaactcacagagatccccctgcctctgcctctgcctctgcctctgcctctgcctcatgtgtattgccagcatgtgttcgtctgtgcacctggtacgtgtggaggccagaagagggtgttagatcccgtggacctggagttagatggttgggagccgtcaccttggtgcagggaatcaaatgggtcctgtggaagagcagcatcttgatttatgaaggttttgttttgttttgttgtgttgtgtttttgaggtatataaaacaattggtttcttttctccctcttttgctctcttcccctcctattcccgctctctctctagcccctcctcttcggtggctttttgagacagcctagtcttgaacttgtggtcttctatacctaaccgacctcccaagtactaaaatagcaggtgtgttcagagatgctggggtaaaatagttttctggataagtatttctgaagggatttattgtcaatttagaagaaaatctttttgttcgttgttttgttaagattttgttcgtcaatgttaagctagtcaaaaaagacttaaaattatgcaagccactttgacctttattgttgatttgatacagagactcgcagtcctcaaagaggagtcagtagttgtattgttaaatgtttcattttctcaagatcatgacctgtactgtatggtatgaaagatgcacttagtgctaggaataaatagcatagtagacagtctacatttaggcttctgggatggggggggagttcaattttatcagactagtttgtttgagacctgtttatagtttcttataggtcatcactagtggaccctagcccaggcttaaaattaggctcaaggagctagagagatggctcagtgattaagagcacttcctattcttccagaggacctcattctgttcccagcactaacaacaggccattcgggccactccaaactacatgtaactccagttcccaccttcttctggcacaccccaacacacacacacacacacacacacacacacacacaaatacatcttttgaggggtggttaggctcagtaggatctctagtccaatatatattgaaaacatattattagatttttttattttttcctttcttttcacttcccctaaaccagaaatctggcatttatcctctaccccaccgctaagtgctggggattggacctagggcatcatacatgctagctggaattttaacttcattcttggtttctatctctaaaaatgtcttcatctgctcagttctgacaggtgggtttcttttgtttaaatgtttggttagtttttgtttgtttttgttttttgggggggggtgtttttcgagactgggtttctctgtggctttggaggttgtttggttagcttattgcaggtttcttgtcttttccttctggttcaccttcagcattgctgtttccacctaaccctgacacttaatgtggatgcaatcagattgttactgtgaaggacgcatgtcaactctgctggtcttgtcactcactcgcagagcatagacacccaaataaatgcaaattctttccactgttacagacagggtttttaagcttcctatagtgtgcgtctgtggagtatattgttattaataatattatgtttatatcacatcattaatggtaacattttaatgatgatttggtgaatattcataagtggtattgatgtggtttgttagtggaaacagtacggtgcagtcacttggaaaagctggacagtttttcataacattagacagcaaaagaaccaggaattcttttgctgtgtatatttaataggaacaaaaacatgtccatagaaaagcacatacattttcctagtgatttgattcttagtattcaaatagacaaaatgtctttgtgaaatggaatattattcaataaaattatataccttttgacacgaatgaaacatagagacactgggatgagtgaataaccaactacaagagaatatataatgtttaatttcatttatataaaataattagaatagacaaatcaacaaaaaccaactggtttctgggagcttcagggagagaaatgattactaatagatacaggatttctttgggcggtgatagaaacatgaaattatctgactttataacatctcacaggttgttttacaagtctgaatatacttaaactgttcaactatattccctaaaaggatttattttgtgctgttagatgtcgatgaagttattcaaacctttaaataaaaagacgtaactttcggtgttcacatctactttcatttcttttcagggttcctcagggcaaatcttgtgacagtttcatgtttctatccagtatatactatcctctgtatagtagataattgataggtgagagctaatctctgtgatgcaaactgcctgagcttacttaaacttcctagaataaatgagaatatcactgtacatcattatacttgtggtataaaatggtacgtttaggaatgggggttaaccaagtggtctattttgttttttaggatacacacctgctaaagctgcttaaaacattagaaggacatgcctatggtgtttcttacattgcatggagcccagatgacaactatcttgttgcttgtggcccagatgactgctctgagctttggctttggaatgtacaagtgagcgagttctatccttggtttaagtccaagttttttgttaaaactttattcttagccaggtagtggtggcacacaccttaaatcccagcacttgggaggcagaggcaagtggatctctgagatggagaccagcctggtctacagagcaaattccagggctacacagaaatttttatctcataaaggaaaagaaaaaagaacaactttattttcagtttatacaacaaccatttaacctaaattaccgtatcatctctcttacaagttatagtgtttcaagtgttaagaatccagatgctaagatttataaatttaatttaacctagatagcaaagtttattaaaaagatggtcagcaagcatttccagcatgtttttccttcttcaatggaatttatactgtttagaaaaaacttttagctgctgtgttttcatcattgtgtgtggagcttataacctttaaagttgtaagatatctgtgaaataaaatttcacattttgatgggaagtatttcttaacctacatgtagtagtatctgctagttcaatgcgactaaagagatacttttatttatattaccatttctaactgaagacttagactttatgatcctgtcttaggtttactccgttttccatagtactacatctagtagaaatatcatagtagtaataatagtaataataggactccatccagtgatggtgatgtcccgaagagatacgtcaagtggcagcatgggtggcatgagcagagtgaattctaagatgtacctcaagtgaaatacataatcctaatgctatttaagatttccttactgctcattatttccctttttaccccaacttgtttgtttgtttgttgttttttcaagacagggtttctctgtgtaacagccctagctgtcctagaactcctagaccaggctagcttctaactcacagagatttgcctgcctctgcctcccgagtgctgggaccaaagacctgttctaccatgccggactttacccaaacttttgaagagaatttttaaatgttaaaaatttgttaggctgaagggataattcagttgtaaagagcatgtactgctatttcagaagaccagagtttggttcttcgcaccagaatcaagcaccataaaatgcctgtaactccagctccaggaaataaaaatctttaaaaaaaaaaaaaaaagtgaagccagatacagtgtctgatcctataatccatcatccattgtgaggctgaggcagggaatactgttgtgaggttgaggtccagataacctgtctagtaagtgacccaactcaggcagcagttaaaaaaatgctatcgctgtatgtgatagtgcatgtctgtaatcctgttaatttgggagaaagacagggagatcagggttcaaagttatcttcagcaatgtaccaagttagagaccagcatgtttccaaaacagagaaggaatggtacggtgatcacatgtgttcccactaccctacacctgatagttgttacgttggtgatattttatgtgtacatatgtacataaattcagacataaatacttaaacatcagctccaatgtatttgaaagtaaattatagataagtttaatccttaaatattcacacaggtatcctcaacaagaacattatccttcatagcattattattttatgtgtataagtgttttgtttgcatgtgtgcatgtgtgtcacatgtgactggtgcctgtgagataggagaaggcatcagatcccctgtatctagagttcatgatagtcatgaattactgggagggtgctaggaaccaaatcctagtcctctggaagagcaaccagtgctcttaactgctgagccatctctccagcccctattatttttaaatatctaacctatatctcattttgttcaaaaaatgtcgtttatgctatttgtatcaagctagcaattaaccattattgtatttgtgacagggtttagggagatggcaaagcacagaataaaataggaataaaacagattaaagtgagtctgacccaaaagattttttttaattaaagtttctttttttttcttccaaaggaggcatgtatagccttattagggacacaatgactagcacttatgtggtctttacatgagtcagattttaatttctaagcagttaaaaccatttttaggcatagccgttactacaaactacttgataagttaaggctttttctagaatggttgtcttttaagaagtccaaaggctatttctgtttttagctaggtttctaatctaatggcctcatatactcactgtgcagaatagaaggaaaacattgctgcctcagaacttagcttgttaacatttgttaaaagcaaacacccaagctttggctgcttttgtacttgcatttaaacttgtagctgttcgggtcaggtgactaaaatagtaattaaacagctgagaatagtgaagagtttggggaaggatttagatgttgaattgggggttttttgttgttgctgttgttctgttgttttttttttgttttgttttgttttgttttgttttgttgttgttgttcctctcatgtaagggagacttttctattttgtgcctcttgtgcctttattacttggccccaggttcctaatcataccctttgttttcactcttttatttttacttttgattacccatttctcacaggaaaattatgcccatgtactttttattataccaagggcagctattacctctcagatcctgtttctaatccttgaacaaaatggaacaagactagattaaatggtatgtgtaatgtctcctaagttgaataacttagaacatgtaacaaggaggatgtctgaggtttaagcactaaaaaaacttgattagttggaagtactgtagattgctatgctaaacagtacagagattctttctttgttctgcttgtaattgaaacaacgttacatattggaaaaaaaagtcattttttcccatcttccttgctatgttatgaacatttgaatatgatatttagcataattaaaattgcccttagtgggctttaagacatagttttactatctattaatcatgttcttaaagaattgttaattgcattaactatagttttaggataaaattcataaagaattttgcactgagatggaaactgggatttaggtttgtagatttcctcttgattgtgaaaagttacatgttagtttattaatataattcttttaagatgagaaatttaataaaattaaagcttattatatctgaacttttaatttttcttttgagtgctatagtcttgtttctggtgaggctagttacagtaactgtttctcggattaggaatggtgtgcaagataccccaggcaccttctgcccttctggcaccttctccctcgtgtctcctcctttctttctccttcccctttttcccctcccctcccctcccttccaatctttttctttctttacatataccccttagaaatcttgaacgtcttatccacagttttatttccttatagacgggagaattaagaacaaaaatgagccaatctcatgaagacagtttgaccagtgtagcctggaatccagatgggaaacgctttgtgactggaggtcagcgcgggcagttctatcaatgtgtaagtattcagtgcctccttgccagagtatgcctatttaaaaggaaattgagctgtttgtttgttgaatgatttttaaaatttacactcgctgggcatggaaggataggcatgctttaaataacagtacctgaaaggtagagtagttctacagagtaagatctatctcacaaataatcagatatcaaataaatgaggatgacttgacacatactatatgaaaactaccatcctcttcaatgtgcatttaatagaatgctaggtacttttcttctgtctttttaaaaccacttcaggtattcatgaaaagtgtaaaattaggtgggcgtggtagctattatcccagcatttgggaggcagaggcaggttgacatctgagttctaggccagccagagctacatagtgagaccctgtcttaaaaagacaggtactaatttgtaggactgaaaaattcagccatttcttttgagtacccaggtttaggcctttgtaaggaagacagcactagccaggcgtggtggctcatgcataaaatccctgcacttgggaggctcaggtggtaaacttacacagaattaaaaagtagcctgggctgtaactagttaggtaccagcctggaatatgaaatgagacccctctgtctccagaaacaagaacaataaacagtgctatagagcagaggatgtagctcagctcacaggacatgatggccccagtgtaattctagcacttgggaggtagagacaatagaatcttaagtcaaggtcctacttggctgcctggtcagcctgggatataggagaccctgggtggaacaacaacaaatatgagaatgccgaatttcatggatattttgctgagtcaaaatagctatctaataaaagtaataaatgctgtggctgaagggatggctcagcaattgatcatgcagggtccaagttgggttccccatgacttgaaaccacttctcactgctctcacaggatacagtgccctcttctggcttctgtaggtaactacacatgtgtacatgccctcgcacagacacacataacttaaaaaagtaaatcctctaaaaaaaagtaatggatgctgacagaatttttcagtcatttaaagggtcttgtggccaataactgctgtgttgattgagattttgatgttttcagtccatgttaccatggagccctggctgtcctggcactccctatatagaaaagactaaccccaaactgacaaaggtcctcctgcatgtgcctatgtattgggggtactaaaagcacatacccccacacctggcgattgtaaattatttgactaaactaataaattgtcctctgacatacaaatgtgttcttatgctgtgttcaggttccttacgtcacaagtcactgtctcacatggttctagtaggtgatttcagacttgttttcctcactgcatcacttcagtcaggtgtttatttagataaaccgtctgtagttgacctttctggaataaaacaatttaataggctatacagcaggcttcatttcttccgggtaggtcatttaaaatatttccagggcagctcactggaaacccagtatcccctgggtagtttttgcaagttgccactttgtagtaaaataaagcttatgaaattcattgttgcttactctagcaggttataagttattaattcttagttctcttttttcatatcacagctttgcatgtttgagaatagtgtttccaggcctatagtcaaactctaattagttaaaatactggtaggttggctagatcagtttcagataaaaaataaagctgttttcattaggcattgccaagcatttacattaggtttgttttctgagtggttgttttgttttgtttctctgcttaggacctggatggaaatcttttggactcctgggagggggtgagagtgcaatgcctatggtgcttgagtgacgggaagactgtattggcttctgacacacaccagagaatccggggctacaactttgaggaccttacagataggaacatgtaattattattttgtttccagtagaaatggtctcatttagcagggtaaggggatgtggaccctttaacccagcacttgggaggcagaggcctgccaatctttgagttcaaggccagtgtggtctactaaaagcattccaggacaactagggctacacagagaaactctgtcttgaaaacttccctccaaaaaaaggaaatggtgtaatttataccaaaatatgtatatagttgggcttttccagaaaagcagttttgtttttttgttttggttagtggtttgaattggtgtttgggggtatttgttaactcattctgatggacatatgtaagacaaaaatgtcatttaagctgtaatagtttagcccggtgttggtggctggcgcacgcctttaatcccagcacttgggaggcagagacaagtggatctctgtgagtttgaggccagcctggtctacagagcgagttccaggacagcctccaaagctacacagagaaactctgtctcaaacaaaacaaaaaagctgtaatagtgtattgaataatttgaagttcttgactctgctgttcctgacaattatttctgatttcagagtacaagaagatcatcctattatgtcattcactatttcaaaaaatggccgattagctttgttaaatgtagcaactcaggtatgttgttttctttttctttttcttttctttttttttttttacaactttcagaagaattcagcttagtgaaaacgtacttttgttgtttttagtctagctgttaaacatacgtgtttagtgctcaactatgtaggaatcaactattaagtttactgaaatactagcattttgcacaaatagaaaataaaaatgctccagtggacaaaggaatattcacaaattactgttaaagattctattaagactgggtgtgatagcccacacctttaatcccagcactgcggaggcagaaatggccatctcttagtttaagagcagttccaagccattggttctcaacttgtgggtcaagacccctttggggattgaatgatctttcacaggggtcacttattagatatcctgcatatcagacatttatattataattcataacagtagcaaagttacagttatgaggtagtaacaaaaataacttaatggtggggggggtcaccacactgtgaagaactgtattaaaaggttggagcattaagaggtaaaaacccctgggctagataggtagatgtcttttaaaaaataaaacaaaaaaactcctaaggtcgtacatgtcagtactctaaaaaacttgggagggtagtgcagagtggtgaacacttttaatcccaacactcaggaaacagaggcaggcgcatctctcagtccgaggccagtctactctacagaccaagttctaggacagccagggctacacagagaaaccttgtctccaaaatgagaaaagaaaaagaacttgggtggatttatcagttccagtctagcatggaacatacagtgaaattgtctttttaaaaaaagtcacacaggggaggcaaaaccaaccctatctcaaaagcaacaaaaactttttttttctcttttgttttttgcctgcagggagttcatttatgggacttgcaagacagagttttagtaaggaaataccaaggtgttacacaagggttttatacaattcattcatgttttggaggccataatgaagacttcatcgctagtggcagtgaaggtaaagtgttttctatcactgttggttcacctagagaggtgaattcaaaggtctgtaattctcttgttggggtagcttgtttctcagcaaccataaaataagacattaattttttttagtagattctatactatattcttaatgttaccttttggtgaatggcttgaatccttgatgttttggttttgattgtgtgttcattttcctttttgttattggtgatgaaacacaggacctcaagctgttagcgttctgtggctgagcccttcttactgttacaaatcagtggaacctgtcctaatcatgttttagaattgtgtttgatgtttgaatcaaatcaaaatttacttaaatcactatatctttatatcacttgtattttctcaggactgatagttttcaaaggttggtaaaagtcaggcttgtacatgcctttaataaactctagcatttgggaggtggaggcagagacaagtggatttctgtgagttcaagaccagtctggtctacatagtgagttccaggacagcagaactatgtagacagaacctgtctccaaaaaccaaaaacttggggctaataattatgattttttaacagaatctttagttctactatggaaaaagaactcaggttgataattttttaaagatagtatgtatgtctaagcaccacttttatccctggtagttgttgcggtttcagaaaagctcaaattaacatagctgtcccttctactaaacgtggtttgtagattaaaaacacctgtatatttagataacatgtgcttagttttctgttatcccaagttatacagaaaccagctgtatatagcagtttcccaagatgaccacagcaatccttttatattcattttcgagtactgtatttcagaagctcaccaaataccctaagtatgtaagtgctaatgtaagaaccatctccttagaaagtttttaatcagtagtgaagctttttcattatagtgacaacgtataggagaaataggaactggggatatatggctcagttggtattgtgcttgccagcacacacagacctgggttgaacccctcacacataaactggatggtggctcacacctgtaatcgcagcgctatgtctaggcaggaggatcggaagtccatcctctgccgctcggtgaatctgagactgggctacagactgtctttacgtaggcagttggttgccagactctgggggacagtagatgtttttgtgacttcagagctagttacctcgagcagaaaaaaaaaaaaaattaatacagtttttcacaaaattaatttattaaataattttatgttttcctcctttcaagttatattgaataatcatgttctgtgtatagtaaatggtaattgatggtcagtaattttgttagtaacatagctttctaacatttctctgaatttctctacatttagatcacaaggtttacatctggcacaaacgaagtgaactgccaattgcagaactgacagggcacactcgcacagtaaattgtgttagctggaacccacagattccatccatgatggccagtgcctcagatgatggcactgttagaatatggggaccagcaccttttatagaccaccagaatattgaaggtaaggcttgtatagtccttgttttctctagataaaacattgctctgagtaccagtacttttaaatagcaatttaaatgtggaatgtgactttctttttaatttcacctatcttgctatatagaaagaatttaagaaatctaagattgttttatttgtttttggagaggtgatgaagaaagcaagctagaatgtgctgtcttgtttgcatcaagttacttgtagtaataatttaaaatttggggggttcagagatgggtgtgtggtaagcgcttgccccatgagcatgaggacttgagtatagtagtgtgagtgtaatccttttgcttttatgaatatgggaggtggacacataggaggacctctagaagctgtcaggccagctaggaaggcatgtgcagcagagggaagatgtcatctcagtggaaagcacagactgacgacacctaaggtcgtcctctgaccccacacatcttggcacctgcaggcatgcacttgcatgcacatacacgggttttattaaaatgctgcttcctcatgatatgtaaatgtgatattacccgaaacatttacttgagaactaatcgatgtgtaaaattttagggacttttgttttaatgatcatcatcttggggttttcctagtatgttagcattgtctagcatactaacgttaactatgtctgatgatgagggaaagataggaactgtgtgccaagtagagtgctcagagtatatttcctctcacttgtgttcatgatcttgtgagacattttatttccattttgtagggaaggaaccaaaatatggcaaatctcgttaacttgttgaatgctgccatttcggccagtctaggtctggaaagttttctcactgccttgatacttgaagaaagtcataaagctaacagatgagggattgaatataatagtgctagagagaagtaataagaaattttatgtaaatgttttttcctcaaagagaacaagtaaaaatgtctcacttggaaggaaataacttacagatcattttgttcagtatgttccacctaaatggttggtgtttgctttgtgtttcccatgcgtgtgcctgtgttgcccatgctacctgagaacagagtgcatgctgggaacagtgacagtcctctgccagagtagcaagtgcttttaactgctaatgccatctttcttccatcctcccacctaacggatttagtatttaaacagagatgaggccaatcagtaggcctttaattaatcctgggactcaagaggcagaggcaggtggatctttgaattcaaagccagcctggtctacacagctaattcagggctacacagagaaaccctgtctcaaaaaaaaaaaaaaaaagaataaaacacagagatgagaataaaaaaccatgagaactactgagtaaagttgtgtgggactttggaggcccttttctgttggttcactatctgatattcctgggaagtcaaccaagacaagaaatctttactataattgccctgtctagtttcaaggcccattttctaagatataattgatctttggagatcttcatctttaatcatctgtactttgatattttctcagtcattcagaatgtgattgaagacataggaaaggaccacagcagcttccgcttcctaagagtgcggtgttgcatcacagtgggataagagttgtactttgtactttgtgactttggttcattgtgattcacttcaatgggtgtgccaaatactgggtcagttgcaagatcaggcccagttcagcaacaagcatcatgctacaccaatgtaggtctgaccctagacagtcattctcatttcaaatcacaactgctttttgagaatatcctttggaatcttcccacacatacaatgaaaacattatttttctaagtaaattgtagctgtttagaataggaatttcaaagtatgagtgggttaaagagaacattcaaagactgtagcataaggtactatacttaactcaaaactttatgtgtatgaaaggtttgtacattattgtgtggggagggtggtggtgtgtgtgctattttgaagtcggtgtacagcttgctggagttggtttccttcccccatgtgggttctattgattgaactcaggtcttcaagcttagcagcaaatgcttttacccatgatgccatcttgtttgcccaacaagttcttaaaatgaatttatctttatgtgttataggtgttttgcctaaatgcttatctgtaccacatgtgggggtggggggccacaaaggccagaagattggagttagacactgcttttaaaactcaccatgtgtgtgctgggaatccagccagggtcctatgcaaggacagccattgttttttttttgttttgttttattttgtaactgctgagccattactctagctcctggcttaacaatgtatcttaaagagttacaagattgactaccttactttctgacttttgtttacatgttataggggtataaaatggaataggatgaagtatttatacgtgatatataagatgcatgaaccttgaaaacagtgtgctaaatgaaacataatcaaaaacaaaaccatatagacacatcatatgctgtgattgcattttgtattgaagtggtctaaaaataggccaacccacagagaccagaggagtagtttgtttgtttgtttgggtttttttatataaggatgtgtgtgactgttataatttggtgaaggactaaaatgatatactgatattgtacaagctgccaatatactaaaattattaaatattttaaattggtgtatttttctggtatgtgaactatatcgaataaaggtcatatatccaccgctcccaaatggagctgggtgatagggtagacctgagtggattgagaacatagagtacatagagtgtgcaactctgccttgtgctaccagagttttctttcctttttttttttttttctttagtaaactagcaaagattttcttattctaattatctattccaaggttagttttaaaaatagggaattctgtcaggcatggttatgcatgcctttaattctagcactctggaggcatagtcaggtaggtctctgagttcaaggccagccaaagcttcacagtgagaccctgactcactgcccctgccccaaaagaaacatgtaattaggaaattctaacataattattcattccttttcctacattattcaaaaaatcatgaggttacattataaaatacaacctaaaaactgagggacatacattgtttaaggactatgaaaataccaagaatttgttattgttacttattctgctattgtatcctgatgcagatttggaaactttctaactggatcttttttccttttgtctcccttttctctctgcacatttccatcttctcttcattcagaggaatgcagtagcatggatagttgatggcgaattggagcagacgacttctgtttaacttaaaattagtcgtattttaatggcttgggatttggtgcaaacaaacatgattgctagctggacagacatgctcgtcatgaaacaagaaccatttctgaagcccgattggggccaaacatttccaccttgcttcatagtaaccagtcgatgaagcacagcgtcagaatgttgttggacaccctgttgaattattccccatcggttgtggagaactgtgctacattcaggcttacccattgaactcagtatatatatttttccctcctgccttttgtctggtgggataccattcttgttgctcttctgtgtaatgaagttcaaatgcttgtttggaaactttatttaacagtttagaaggcttgataggaagagttcattagtctgaagagtatacattggacaggaaagaatttctttttgtttctccaaatctttccgccttatttagcttgagatctttgcagcttggttcatggattctagccttgcccgttgcgcagtatatactgatcagatgataaaccagtgaactatgtcaaaagcactctcaatattacatttgacaaaaagttttgtacttttcacatagcttgttgccccttaaaagggttaacagcacaattttttaataataaattaagaagtatttataggattaaagtgacttcatttgtatacatttggaatctaaaccagcttaaaaacagtttcctctgtgactcagatatgcagtgtaactgagctcttctggagtaccacctgagacatggcatggtcagaaacagtgctcagaaggacatggcacaggaaagccagagagatactttgaaggttccccctttttattttattctagaagggacatcagtatctgatgttgaagaaattcaagattcaaaaggagacttttataaatacaccaacatgaaaaatcagccatcagtgtaggttttcaagaaagcttgttccaggttcctgtggacttggtgtgacctagtaaaagtagagatcagaagataggtctgctttgggaattgatagtgtagttgagacttaggagaacccagcaggttacaaactgtaaactgggattcaaaccgcagtcatttctcctaatagccagcccttaatgcccaacatatagggacactggaatttaaagaagatttcttctcagcttctcagatgttgccatactgaacctcattcaaactggtgctgtggacagtctttccccctctccccccttttagtttaaaggatggtttcctttatggaaaaaagacttctcatttgaagactacttctaacatctgatgttgcggatctaacagtctcccttgaaatcccctgtttttcagtagaggataatcagggtgaccacagcctttgaaacacaagtggattactctcaaagtaagatcctggtgaagaaaaaaaatcttgtaccgagttaaccttgaggccaatccaagtccgtagcattctcaccatgagcatacccttcaccatggccctaggaagagagaggcttgcatgttagggtcataaagagggatggcagcagagaggggaaagtcaggaaaagggagaagaagaagaaaacacatttggccttaaaattgtgtttattctcccaaagcccatactaaggaaattacagatcgtagtcgacaattattttatcaaattggtatgtaaaagattcctttaagcttcattttgcagagaccaccactttagaaaaatcagagaaatcctgttttgatacttctaagttaaaatatgttaccgtttatctggtacttcatttcttgactaaaattacttttcactttaagcttgaataaaaattttcattcgtaactgtatataattaagtggcaactcctctttacctcagtgcagttagaaccgtattttgattaatatgccctgaagccattaatacatacaccccagtctctccagtaacaatcactaacaaaatgtggtcgcagaactccacagctgtttacaaatgtgattacattgtactgtatggtacatatgtaatgttccttgagattcgtgcccattcagggtagtatgacaattcagattccattagtataccaagccacacctacacctgagttttcacagtgcttctgaagtacagttaaaaacacttaggagtaaaaaaatggactgaaagtgagggtcattttacaagaccataactccttgttaaagtggagttacaactatgcaaaggtgttcatagcagctaggtgagtttgttttccggctgttctaaccagcagcttcctgtgtatactggtaatttgctgcgccaattgctgtaagcatctgtttcgtatatttacaatgaagagagtgctagaaaggggaaaagacggtgaagaaacctggctattaagagggaagaacctggtggcaggatttttctaacccatagctattaactgaaaatttctgacaatatgataaaactacgtaaaggcttaagagggaaaagtctgtcaagccagccacaagatactaaccaatgtatacactgaaaagtaccaatactttttgcacatagatcaaaatagtggagaatttttgactccaaaaatcaggttagtaggctcaattccgtgtgcttaaaaatgtttttgttgttgttaatgcattgattaagggctagagcaagaatgaaattaaatgtctttttcctctaaataatactggttattagtggtaaagtgttggatttgggcatcactgaggttggtgtgtgggtgaaaaagaattagagtgggggttagttgggggagatgacaaagcttcgatttgatttttgtattttagtattcatgccagctgtattttgttgctggctagataaatgtattctagtaatccaggtaagtagttgaaaacaggaaattttacttgcagatgtctccatatattggcccattttattgggtgggaaaacaaaaaaggaattctctgactctaggtgattaaaataacctgctacacaaaccaagagcaatcttgtcaccatttccttagtcagagaaaacacagcagtaattcagtaagattagtgagtaggagtactctgcctcgactggcattctgtgacattaatagaaaattcttctttcccacccctccccaccttgaaaccttcttttttaggacgttggttcctgcaaacaagaactcaccctctgcctcccagtgggtaaatgtatcgcacatctcttgaaagggaaagggaacatacccatgtcacttactttacagcagaagaatggggaggaaagaagataattggtcttagtatcctttgtgtcccattttttaaaatatattttcacttagtaattttactttaatgtctccgacttcaaatctcccttcgtttgctggccaaagcattatcccatttccaaacccatacctgacttcacttcaactgctaacttaaaagaggtgaatttgcatttacacatagacgctttctaaaaacagggtgaacttaatctaaacttggcagtgttattgttacagtagctgccctagaatttcaaaaacaagctgtcagaactcatcccctatccaagtagcctggatttaatgaagttaatcgtataaaattttgtgttttgagaaagaccttgattcataaaatatcctagaaacaacttctaggttgtcatttttactagagtcttgtgcacatgtaaagtgccctctcttgagtgtaagacttggttaatacttgtctatttttataagaatgaaattgtgtcccacctttgatttagacaggatcagtatgctagaattaaatcataacattttttagactcagcggggaaatgttactggccccttgaaagtgagcgagaaagtctttttttgttttttgtggtttttttttttttttttttttttttttgtgtgtgtgtgtgtgtgtgtgtgtgtgtgtgtgtgtgtgtgtgtgttgaggggagtagatcgcaaaagcatgtgtgtgcttacaaaccaagctgtagagatcacataacttgggtgttgctctggagatttctgagctgtagagagtgataaggcactgtagctcacacgctgttggtgtggagtaacagttaactctgaactggtagatgtttccagaggatcgtgttcttaaactttggggtttgcttttttaactgcctctcagattatatctagtagtttaaatttctttgttttattatttcattaaagtataaaaacttcaggtctcatatttattttcacttgttctactaattatttacaagacaccttttggttgacatttattttataaatgtgtggtatattaaatgtcgttaattttttttgtttgaaattacagtaacttggatttgctttactgggatttttaaattttattttaattacaccttttccatgtcagtgcacagcacttgcccagtcctttgtattcccttatctcaattcaataaacagaacgagtaattaattcttgttgtattacatctcaaacaactagtttgctgaactggtggccatatcttgatgtagggtttgtgaatggagtctaaggaaacagttctcggtgttcttgcaggaggtcattgtgcagccagtcatggataaagttaaattccaagcctgtacctaatagcagtgcatgtgggactcaacttgggtaggggaaggttaagatttcagatttccaaaacaatttcagatctcattagagggaaaaaccattaagatggctcagcagataaacgtggttgttgccaagcctaatgacctggacctacatgaagagagaaccaactcctgcaacaacatgcctcccccaaagaaataatagtaaaattgaaaggagaaaatgtgtttgtgtgtgtgcgtgcacacgcactcacaagttcatcctcactctgaagttggagaaagcctggaatccctggagatggagctaaaggaatgggaagccccagacactgacactaggactcagcaggcgctcttaactgctgagccatccttccagtcccagagaacttaattacaaggtgtccgcctgccaccaatccattgattggtgtttgaccatcacaagaccaagctgtattacaccccagtggtgacaccacaaattagaagcaggagcaagagtttgagggactgagtggtactgatatgccaatacactcagtgcagtgtattccagacctaaaacaagccacttgataatacaagtacagtagatttatgaggcaaatggtaattcccagcttatatacttctaagctaatgtttgtagtcataccatagtcttcccttagtccttaggtggccacttagaaaaatcaaaatttgttagtgtcattaaaattaaatgacacttgagatttcaggaggtatctatataaatacgagttttctagagtcttcaggcaatttacttagtatgtcaaggccaggccactcatctgtgaaaagcaactaataatatcctaccagacgttgaacaaaatgcagagtgatataaagcttaacaagactgggcagtggtggctcaaaactttaatctcggctctcaggaagcagaggcaggccagcctagcctggtctacagaatgagttctaggacagcaaaagctacacggaaaaaagggggataaagcagaattcaaggccatccttgaattcaaattccagcactggagagatggctcagaggttaagagagcactggctgttcttccagaggacccaggttcaattctcagcatccacatggcagctcataaccatttcttaactccagtccctcttctgactactgcagtgaaataaaagctttatagacattgcccaaatgtatagactttgtttagatcactatgttcacacaccaactgcagagcttctgagccctggggaagtttgagccagccctcataggtcatttaatacaaagaaatggcagaatctaactagttgtactcaggagggagtggtgggaggtttgtgtatttgaacctggcctaagctacatagcaagaccccttctccccccccccaaaagtgatagttatgtagagggttggcatatctgtgtgctttaagattctaaaccttaacatatgtgatgttgaacttgcttcaaagcataggagacaggttatcggtacaatgtgttgattattacagctggtagaaaacgccagctaaacgctctataggctatctatagaggctggagatggggctcagtgatttaagcacctgcctcacatctgtgaagccaaagccaatctcagtttccagcactaagagaaacttctgagtagagcaatggctcagcagataaaaaagcactgagttcaatcctcagaactcacatgagctggatatggggatggagatgtgtcatctttgccggcctggggagcagagaaatcacccagaaggtagcaggccagccatcctggagaacgctgggcaacggcagagatgagaacaagatggaaggtgataactgaatccacatctcagtggatcttgccccagaaaacttttaattctcaaagtcgatagagatttgctacttgccttctcccacgggtctctgccttcggcaaacatagcagctaatgtattgccctcaaataaggttcaactctgcccattcgccctgcaatgagcaggtccagatgtcaaggtctacagagtaacttcccacagttgcatccatgatctcttcccttgagaagatgagtttgaagcaagctttgggaatggacagaactcctttttaaagagccagccaagggagaagtggatccaggatgaggccaagtcccttaagttggcctcacagatcctcgggagtgagctgtgaggaagagatgtcaggagaaccatggaacagtaactcagtcttactatactactactacgttacaccaccagggctgggctaccgccagtggtagaatccttgccttacgggcaaggcctgggttcattccctaccactgcaaaaacaaagatttgaccacaaccttccaatctgacatatagggattcttttagaaaatgggaacttagcatatttaaggtttttgtgttttcagtttggggtatttgagacgtgcctggcagtataactcaagcaggccttgaagcagtgctacctcagcctccaccgctggctttcaggccaacacacacacattttggccaggttctaatgtttagtggaaactgacagatataaaaatggcactttagccgggcgttggtggcgcacgcctttaatcccagcactcgggaggctgaagcaggcagatctctgtgagttcgaggccagcctggtctccagagccagtgccaggataggctccaaagctacacagagaaaccctgtctcgaaaaacaaaacaaaacaaaaaatggcactttaagggatgtagcagagcagagtggcaacaggaagccacagtcaaacctctgtgcttcagcaagttgcttatgctcacacaccctcctccccacccagcctcaggggagcaaccgaaaagttagctgtctttccaaactgcaaagacctttctaaagagcaacatgagtgtagtaccaagtaggtgctgtggtaaccccagttgaggctttgaatgagacgttagcaaaagctagccttctgcctttttaaagacatttgagaaaagtggcccaaatccaaaggcttcactgaaaatcctcaagaatagctattttttgaatagccttgctaaccaattttactacatcaaaatatttcaatctattatagtacatggcaaaacagtatgtttggtttaaaggataaaacttgggataaccaagttctagaccagcccaggacacaggagatcctgtctttaaaaataaataaataggctagagatggctgcagttaagagcactggctattcttccagaagaaatgggtttgattttcagtactcgttatctaacaaccatatgtaactccagccccaggagatctgatgtcctctttgggcttctaggagcactgcacacatgtagtgcacagacatgcaagtcaaacactatatacaaataaaaaaccttaaaatcagccaagtggtggtgcacacttttaatcccagcacttgggaggcagagataggtggatctatgtgtcagactggtctccagagggagtgccaggacaggctacaaagctacacagagaaaccctgtctcgaaaaaccaaaacgacaattgctgaacctaaatggtaaacaatttcaaattctcgccttctgtggtactggagatggaaccaatagccttgctctgccagaaaattgcactaatactgagccataccccaattcagcctatttctgttatcatcattgtattatttttttcaagattagatttctggctgttctggaactggccctgtagaccagcctggcctcaaactcaagagatctgcctgactctgtctccaaagtgatgggattaaaggcttgaactaccactgcctggcttcttcagcattattaaaacaagtttatctagatatcagaattacacctagtatgtgataatccattaaattctgataaaatgttacttgtaagcaaaattaatttcagcaggctcagaagagcttacaatacttgtagtgttcgctacatcattgggctggtcgttaagggcgctggctgctctttgggaaaacccagtgcgattcccagcagccataggcagctcacaactgtaactccagttgcaggggatgataccctcacacagacatgcatacaaacaaaacaatcaatacacttaaatttgttgttgttgtttttgtgagacagggtttctctgtgtagttttggagcttctcttggcactcgctctgtaggccaggctggcctcgaactcatggagatctgcctgcctctgtctgccgagtgctgaaaataaaaatatttttaaaaagaatactttaaaaaagagagtggtgagctttgattctgttgttccatgactgcttctctgaattgaaggacatcggtcagactccttgatgaaagagcaatggaacaacacaatcatatcagcttgttattcaacagccatttattgtttgtgtgtgcaaggcactgtattaggctccaggagagaaaggaagacaatacagtcatgatcagagtggaatctgctctccaggagcgcacaatctaggaagagaccagctgcatatgaaagtggtgatagctcccacaggggaccatgtcagagggaagccccgggttacctgttacatcctcccctgtgtagcaagcatgaaaagagtggggctgaatcttgggtctcacttcctcagctctggatgggtatcagctatctacagctattattaaaagcctaaaaggaaaaggggctatgacccaccatggaagcgcccaatggtatagtctccactggccagcctttacggagggcacgggggacactgaactaactggactacagatgttcacacttttgagacctctgacagacctttgaggcctgtctccatcttttgagatgaaaatgcaagaacagatgaccttgaaggagcctgcattgctctggtcactgtacagaagcgctgtggcacaaccacagccactcatgcttgttttctcctttcagcatttatagaagcatcccccctccctccaaaaagtccagaggaatgactcctctaacccctttcctggctttgataaacacaagcaatgagaaagaaaagggttttgtttgtaactggttagcatttcagaatgaagtttggttgttaaagactaggcagcattctcatttactcggcctcagctgcttgtgcctgatggacacgtgacaggtgctgagctgcactgggtctgggttaagaacgcttggagaggatggaacattttagtccgagtcctccaccaccttggagccacttcagtgtcatcgcttgtttcagttctgtgaatcctccatcaggtctgcttgaaaagcctgagtaactgaggtaatggaagctggggcggggtgttaaacaggtgtcccaaagagaaaaggaatgaaaagatgaaaacaaagtcactcctctgttacagcttcttagccctttcccaggcaaaaaaaaaccccacaagattatggttgtgatttcagagtcccagggaactgagtttactttgcatgccatcccaaatccttttttcctgtgtggacagaactactcccatagcttccctgctctctggcttctaccaattctcatccaacaagacatgcagcgtttaaacatttaatcttctggggaaccacatactgttttgccaccaaggtccagcatgccaaagtgaacagtcatgttttcttcaatatcagtgtttaagataccaacattaaaatgcaaataggaccaaggaagaattgccagattcacactgcactgcaagttgtgatgaacagactggggggctcacggccctccctcatctagagcaagagtttaaagagtgcttaggtattgccatgtgcatgcaatggcttgtgttgggttttccaatccacaaagtgatcagtgaaattaattctgcaccaagtgagtattcacaggctgtttcactaacaatgactgactcatttcctgattctgagtgtcttctaccaagtctcctctccaaatccattaaagcatattactaaagagatcaaatagaaatggaacaattatgatgcaaaaataagtcctggcaagagcaaagctgagtgtgtgtgtgtgtgtgtgtgtgtgtgtacatgtacaagtatggggggtggaattatggagatacaagctttaaaatgaaagctcttgataaaatattgactttaaaatttatttttcctttctgtaggcaggaattacattgtacctgggcacatggcttgtaaggtttcaaatactgcaaagaaagaaatacattttaaaatgtcattttctgttgaaagacttagctgaaaagtccctcaaatccttaagccacattaacattaagttgccacaatagatggcaagagggataattaactttcttcttttgtccagattagctgtattgctctctgctctggcttttcagacttcatgtcagccccgctcatctagtaagggctctcctaggtgtgccctttatttctgtggcatacaaagccagcacacattcctgcctttgccaaaaagccacagaggacacaaaacaccttcatatgctggggttgagaatcagaaatctacaaaaactcaattcatttttttaaatactttatgtggtaaaaatacagcaaaaatagttttttgttcaaagaccaaaatagatactgctatggtcacggttttaagggtggtttaagtagtctctggctcctcaattgtgcagtgtagtgtaggttggcttcaaccccggcttctccagcttcagtcatttattaaagctagaatcatactgtggaaagaagaaagtggaattactaatgttccctttggactctcctggaatctggtccattcagacctgcatccccatattcatcaagaaatacccactgcagtcacttaaacctaacagaatacacagataaaagcctctattgttttcactaacacaatcaacaaatgaagatgagagggagagagtaaaatctaaaaccaacttggtgctgtaattaaaagtaactagaggctagagagatggctcagcagttaagaacacttactgctctccagaggacccatgtcaagtggctcacaacagctacttctaacttcagttccaggggacccaatgcctctggcctccaagggcaacagaactcacatgcacatatccacatatatgagcactcacactaaaaataactataaacattttaaaaataaaatatggccgggtataagcctttaatcccagcactcaagaggcagaggcagttagaggccagcctgctctgcagagcaagtttcaggaaagccagagctacacagagaccctgtttcaaaggaaacaaaaaacaaaaacaaaaccaaacccaataaaataaataaataaaagccatgcccaggcaaaaagcaacaacaaaaaacacacacagtaattccctatccagatctctgccttgtgctgtatcctagcattctgctactaacccactaattcctactcacaactagcctctgaagcacttccttgggggagctgtccttagctcaatgcagatgtaaggtctcctcccacagcccatcatgctgctgtacagctggcaagctggtctttgtcagtgagccgtgaggacagcccctcttccactctgtactctactccagactgcaactggcgagccacatgccttcaccactgggctgtgctgctccttctcatcactcaaggtgacatcaggacaggaaatactcaagaaaatcacctcagttacaatgaaatataatcctttccttcaatggcagggaccaaccttgctcaagatcaacagagcaaatttactgtaatgcacagaagtaacctcggtgttactaacaaatagtcatactaaacttactcagtgtgcagatcaaaggtagtcgctaggattttgaaaagatttttgagtttactctacataataaatttaagcactttacctgcacttagttcatactgcaatccattaggtaggtgttagtaacaacccatttcagatgaaaacccaaggggcacagaggttaagaagcacatcccaaatctcactctaagtagtagagcctaggtagcaccttgacctacatacaagccaaaagcatgggctccaccattctctaaacatgggaacattttttccaaaacattaattccatttaacaatccctgaatgcctgctactgaagcagatgtgagagaagcataaaacccctgaaataaaagttgataatttggtaataaaatcacttttaaacaaaagcatccattccaacactttcaactatgaatgacattcagaggtaaagctaaaaatgacaagcctttaagctaacaaaggaaaaggaagggcagaaaagaggagggcattcctaaaggggtacaacacactgacaaaatagttacacaggctgcccatcttacccagctgtaaagaaccacaccttaagtcaggcggtgggggcgctcgcctttagtcccagcactcgggaggcagaggcaggtggatctctgtgactttgagacgagcctggtcttcaagagctagttccaggacagcctccaaagccatagagaaaccctttctcaaaaaaacaaaacaaaaacaaaaaacaaaaaaaaaaaacaaaaaaaacctgcccctaaaatgctactccaacttttttgttttcttatttatttgtttgtgttttttttgtttgcttttttcttttgggtttttcaagacagggtttctctgtaacagccctggctgttattaaagtgctgggattaaagcatgtgctgccactgcctagcttatttctcttttcaatacagggttttctctgtgtaacagccctggctgttctggaacttgctgtgtagaccaggctggccttgaattcagagactcatcttcctctggttcctgaatgctctgctaggattaaaggcatgcatcaccactgtccagctcttgttttcttgtttttgagacaggatcttgctgtaactttgggaaccatggaacttaataagtagtctttaatggtcttgaatttgtgattctcttgtctcaagtgctgggattacagatgtgcaacactattgctggctaaaatgatttttaaaaaccagtgtgttggggctggagacatagactccttgctcttgcaaaggacccagtttcgttcccagcacctgtatggcagctcgtaactgtaactcaggttctagggtatctgaagctgccttctgggctccagagacaccaggcacaaatgtagtcaagcataaatgcaggcaaaacaccatatatataaaactacaatcactgaaaatcaaaaccaaaccatcatcttcccaggagtggtggttcacacctagaatactagcactagagagactgagacaagagaactgttgtaagttccaggcctgatcagactacatagtgaattccaggacagccagggctacatagcaagacccggtcttaaaacaaaacaaacaaagtctataaacaaacactttaaaaattttttgatgtatgagtctttttgtctgcatctacgtctgtgtatcgtgcacatgcctagtacccagaggtgaaacgagggcatcaaacccctggaactgaagctaaagatggaaatgagccaccatgagggtgaggggacttgagcctgtgtcctctggaagagccaatgaatgctcttaaccactgagtcatctctccaactccctttttcttttatttcttctcttccttatttttgagacagggcttactactatgttgtcctggctggcctgaactcgatctgtaggccaactcagaaatctatctgcctttgccatatgagtgctaaaatgaaaagcatataatactatggctggcagaacaagagtttctaatctctatatatttgtattttcttttagctttgtgaaatgggacagtgaaaactctcagctagatttaagtctgaaaatgaatagcaatggcagttttagagcatgttaatagcctcaacagctaaggaataacttaggaattacagaaaactctattataggttagacagaacactaactaatgacatatgtaaaaaaaaatctacaccgacacaataaattcatgtaactacccaaagtcttacaatgccaatacaaaatcctacagtacaataatacctcataaacccaaccaaagcaggcacagcatccagtatgctgtaaagggacctctaaacttacctatagagatacatgaagaaacagagcaggtagaaaccaagcttgatcatggcttctttcatgtgtgactttaactgtccccgattgtgtatttctgttggatcaaacactcccatgttaccacttggcaccataatgaacctgataaaagaaacttacattagaaggggatcaaatcttacaatgaatactgaaaaaccgtactcaacctacaaatgtggaccagtccttgcagcctcaaattcagacaaaatagagcagtatgatgacatcttgggctccatctggttttcctttggaagctactgctaacttttcattaattttctacccactaaaacaaatgtagtagtaatacctacaacctttaacacgtcttctgtttctctttagctctttctcattagatacaagttaaagaggttccaaatccatgctaatggcataaagttctcagaaatgtcttaggtctttttgtgtttgtgtgtggtgtttgtgtatgtatgcttgtgtgtgtgtgtgtgtgtgtgtgtgtgtgtgtgtgtgtgtgtgtgtgttccaaatccaagctaatggtataaagttctcagaaacgtcttaggtctgtgtgtgtgtgtgtgtgttgtgtgtgtgtgtgtgtgtgtgtgtgtgtgtgtgttccaaatccaagctaatggtataaagttctcagaaacgtcttaggtcttgtgtgtgtgtgtgtgtgtgtgtgtgtgtgtgtgtgtgtgtgtgtgtgcgcgcgtgcgcgcgcgcacacaggccataggttgacatcaggtgttttcttcaattactctctactttctatattgaagtagggtttctttttctttttttcttttaatttattttatgtgcactggtgtgaaggtgtcagatcccctggaactggagttatagacagttgtgtgctgccatgtgggttctgagaattgaacctgggtcttctggaagagtagccagtgcttttaactgctgagccatctctccagcaccacagtagggtgtcttgcctgaactcagaactgcctaattcagtagtttagatagacagcttgctccagggatcacctgcctccacttgagagtcaggattagaggcaggcccaggccaacatgctcacctggtattcatttgagtgctgggacctgaattgcagtcagtagtcatgcttgcactttgaccactgagtcatcttcttagccccttttcttggtatctgattcagggccccaccctgtagctcaatctggcctctaactcactacatagaccagcctagcttcaaacttcagagtcatcctttcccagtttcttgatgctgagactccaggttatgtatcaccatgcctggctctcagaaacttgcttacgtaaactgagaaggaaaacgaggcttcaccatcgagactgtgccatctgtgtaacatacatgtctgaacccagcaccataactagcctcctcctgcatgcatgtccaggcttcttgattgcctcactcttgccacataaagtttctcaatgtcatttctgtgaaatttaaaagcctttccgagcttcacgagtcttaaactctcccataaaccctactagcctatccatacctgaatagagggtatttaatatctaaataatacctccacatagtctaaaaagattacagctcagaattattctgctacctaagttccttggtgacacttaaggctttcttcttccccaatcctgtctcactcatcttgcacagccaacccactgaattcctgtcatttgttcttcctactaccctttataaactgtctctctctcatccccactagtacaaccctgctccaacaatataatctctttttcattctctgaactgaattctcaatatcctggcccttctctattcaacactagtgaatacttctctattcaatacatgctgcttatgcaaacatctccccaaagttccttaaaaacataaaatgtgggctgaagatgtgactaattggaacagcttttccccattatacgcaaaaccctgagtttagctggttgtggtgggcacacctttaatcccagattggggagagaaaaaaaaaaaggaattgagtgctttgagtgcatatacaagtacaaataaatgctaacatactaaaaggccagtcagaaaagacaatgcactcatctgtatatacgtctttccagaatctgtaaatgtagagatagagcagatagggctgtggatagaattcagttggtagagtgtttgctcagcatgtacaaagcactgggtttggttcccagtaaagcataaagtgagcatgctagtgcatgcctgttatctcagcacttgggaggtagagagattcaaggacatccctcttcttctgtgctggctatttttacatcagcatgtcttagttaggattgctattgctgtgctgaaacaccacaaccaacagtaacttggggaggaaagggtttatttgacttatatttccacatcacagttcatcaatgaaggaagtcagggaaggaactcaagctgggcaggaacctggaggtagaagctgaagcagaggccatggaggggtgctgcttactggcttgctcagctttctctctcctctcctcacctccctcccccccacctccctcccttcctcccccccctccctccctccctccctccccccccctctctctctctctctctctctctcggttttccaaggcaagttttttctataatagtcttggctgtcctagaactcgctctgtagacaaggctggcctggaactcacagagatctgcctgcctctgcctactgagattaaaggtgtgtgccaccaccacccagctcagctttcctgcttagagaattcaggaccaccaccagtccaggggtgtacccccttcaatggaccctccccaatcaatcactaattaagaaaatgtcctacaggcttgcctgcctacagtctgatcttatggagacttttccccccacctctgagacagagtttctctgtgaagtcctaaatgtcctagaactagctctgtagaccaggctggcatatatatatatatatatatagatagatagatagatagatagatagatagagagagagagagagagagagagaagcaatctactaacataggagaaatggctcagtggttaaaagcattgactcactggctagctacccttacataaaacccaggtttggttcccaacaccacaaggcaactcaaacccatctgtaactccagttccctgggatccaataccttcttctagcctccaagggcactcatacaaataatatacatacacatacatacatacatacatacacacacacacacacacacacacacacacacacacacacacaaagaaaataaatattgttccacaatttttcactaaataacagactataacagcttgactatgagtgtttcccctgggttatttctgaacaaatttctagggatgattttttgttgttgttgtttgttttttcaaggacaggatttctccgtgtagccctggatatcccagaacttactctgtagcccaggctagcccaaactcagatctgcctgcctaggcctcttgagtgctgggattaaaggctctagccaccccaccacacccccacacctgcccatagaaggatggttaatcttgttaatataaaagataaaggaaggccaaatcagtaaagcacaacatctggttgtgtctgtgaaatttccaggagcaattagacgatgagaactgtgacctaatcaatggggcaaacccttgatgtgctcataagatgcaagcaatattgggaagtggtgacaggcagcaggtggcccagatgcaagtgtgtcactgagtacacatacttgggactgtatcttgccctagtcccttcctaattctctttttccctggttccagctgccatggagtgaagaagttcctcctggacaagggcttgggaccaagcagccatgaactgaaagctctgacatggtaagctaaaaataatcattcttttaagctgtttctataaggcattttttgtcacagcaatgagaaaagtgactaacacactttctaaataaaaaaaaaaatctatttatttacttgtatatgtgtgtgtctgtctgtctctgtaggaaagcaggatgctgggctacggggtgctaggatctaaactcccacactcattatagtgcagtgagtgctcctaaccactgaaccatctaatttttttaatcaaaaatttagttatttaatctgcactgacaaaaaaaagaacaaatcctcaaacaaacaaaaaaatcccataccaaaaaccaaaacataagttacctggcttgcaggcactaacatgcaattttctttgatgtatttccagtattataaagacaaagaccttattgtctcaagcctttgactatcttagaagaaaagtattttttttggggggggcgggattgagacagggtttctctgtagctttggagcctgtcctggaactagctcttgtagaccaggctggtctggaactcagagagatctgcctgccttcgcctccacctcctgagtgctgggatcaaaggtgtgcgctaccactgcttggcagtggattacttttatacctgtaatttttgtgcttcaccacaagactaagatatgcaaactactatctatccaacagaccaaagcaaatacaataatttgtgctgatttcataaagtttcttgttctttattttaattactggggtatttttgtgggaagaacatgctgttaattattttcttttatctagggcttcatgtaggctaggatagcgtcaatctcactaaatggccaaagctgaactcaaactcctgatccttctaatttacacctcccaaatgctgagattacttactagcaagcactgggattatagacatgcaccaccacaccccgctgtaaaagttttcgaagaactgctgtcacaaagtgataaacaaaccatacttacctgtatatattccaagtggcaacaggtaagttgagaaggaagatgaaccagtgcagtgaagcaagcattaacacggtgacaatggtgtggccggtcagctctggtattacccactgcaagcaagcgaagaacaaagcatcacagctcctgacccatcttttccggctgaacgtgacacataggtcaaacccatgacagtacaaagaattgttatttttagactcagaaaccccagatttgacttctaaccctaggcaaatacatctggtaacagcttaaagatgaagcatttaaatttcagttctatttcaccctaagcaaagtcttagagtctttcgctaagcaggtatgaatcactagggaaaaagcagagtactacttattttctattcctgtatttatgcaatatgctaaagcctccagctccaaattaatgtggttcatagccatatgcatgcctttccagttagaatgtccatcttcaaattttccccttccccctcctaaacaacttccccatttccatcatcctcatcaagtaaatgcccctcagaaagataaaataaatggccacgtgtaaataagtgcctgcaatcccagcactaggaagtcagggaaatcactgcaagttcaaggccagccaaggctgcctcaaaactataacaaaataaaaatagaaattttaaaataggaagctggagaggttcagtggttaaagaactagctgttccttgaggcctgggtttgtttcccagcacccatatgaggtggccccaactacctataaggcttcggggatctcttctggtctcctcgggcacctacacacgtcgaatggactcacacagacacataaataaaaacataaaaagaaattgttcttaaaagattaaaaaaaaaataggactggagagagagttcagtgattagagagtacatactgactcttcagagggcccaactgaagttcccagtactcacatcaggtaggtgacaaccctctataatccaaaccccagtgggaactgacatctctagccagtacaggcacctgtgctcacttgcacatatagacacactaaacagaactaaaataaacagaactaaaataaaaggatattaacttgaatagcaatggataacagaagattactaagcaatgtctttaaaagtcacaaggaaaaaatacttgccagattacaaccctgtactcagataaagaatcaaagatatacgtaagatgtgttcaaaaatagacattttcaaaactccaattcccacatgttggctgtacctaaagaagctactcccccaaaatgaagttgtagccaagaaggaagacacaagaatcaagaatcaggggatccacaacctaataagaactatgaaacagctcagaacagccaggtagaaggcagcaccgcccacaggcctggaaagacacgccctccccatacatccttttaagattttgctaattcattcatttgagggagagaaagcaaaaggggtcttgctatgaagcccaggctggcctcaaaatcctgataaaattctggcctcagcctcctaaatactgggatcacaggcactcactaccatgcctggcatttttgtatgtataagatagtatggaagggcttatagatgtgtctgaaaacacagtaataagtaaacagaaaactaaagaaataaagaaatgtgacaattatctcccccctccccttttctctttttttcttcctttcttgttggtttgtgagacggggtttctctctgtagccttggctgtcctggaacatgatctgcagcccaggctggcctcaaactcagagatcagcctgcctttgcctcctaagtgctgggattaaaggtgggcaccactacaggggtaaggggtgggggtgcaagggaaaaattatcactgtctacgctgaggctcagtaatgaagacttaaatttttacaagattagataataaggacataaatactggaacatcagcttactctgaaaagagaaaaagatggtacaacaagccaggcaatggaaacgacaagacgcagaaggaagcaggtgttctcactaagggaataactaactaccaactcctctgaacctcgtttttgtttttttctaacagacttaagatatgaagtcacagtactgtttttcaagtcaagcaaaacgagcctctcaatatatttttacatgaaattttatccagaaaggttctttgtctgtccatctcataaaatgaatcagggacaaatggtttccctgtatctagattaaacccccaactcagaggatttatgccattataaagttcttactatactaaatataaaatggccttaaaacgaattaactaatcgagtccattttttccccagaaaccacacaagaaagatcttctttcactcaacaacagacagaatgaacattttttccatgagtgggaggtagcagtatgggcccagaaaacaagaacaattagcctcgtgtagacaagaagaccaggaacatgcacagtcaagaaacaacatttaaaatcagatctagcataacttcatgatctataatactggaaaacatagcagttttggctacaacattacaacaaataccaggatcctaaaatgaaaaaaaaatgcaaatattgattatctataataaaacaatatgaaaagaattggcttcaaccaaaaatgagaaaggcatgtcttaccttgtttaattttgagcaacatgatctagcgttgatgtaatcacattctaaatcagacaatgtaatgatctgatggtcaagataaggaattccatatacataattttggtgtttgtaaggtatgtgtatgtgcacatgtatacaacagaggctgatgttggcaatcttctattgctctccacatctgactaaccctgaaacttgctgtttgactagactggctggccaacaatcccctgggacctttctgtttctactttccccagttctggggaccagaactaagtccctgcacagcaggcactttaccctaatgagccacctgtcatgacccatacttcctgtttaacaaccaggtattatttatgctacagaaagcaattccagcactcaggagataagtggatttgagttcaaggacaccctcagctacatagtgaatttgaatttcaaggccaggatggcatacatttaacactctcaaaagaaaaaaaacaatttaataaaaagtaaaatgttctcaagtaagtatcgcctaactcatcactttccccacaaattcataaccagacaatgccaataccacaattaacactatagttcaaattcataagaccctcttcccaattggtttatcttccaaactcctattttcaatctactctgaagattcgtcttcctaaatcgctgtattttgagcttttcaagtgacaaaactgcctgtttatcacatataacatgtttcaaataatacatacattgtagaatgataaaacctagccagtcaagatgtaatccctcacatggttacttttctggtaaaaggtatgtgactttcacaaatctgctacattgtaaattgcagtgagcagatgaatgcagctcccctactctctcggtggattgcgtatccattctatggaagtgctctaccactgagccacacccccagatcaacaaaacattcctggaacttatttctaacagaaattgtgtatccttgacctaaagccactttatgtcaaaagtttgcagtgactcactactgtcctcctcttttaattaattcttccttcccaacctgatctcttgctacccacttctggtgctctttaaccatcacccagaaatgaacatgcctgtccctgcagctcttgccagtgactgcaaatatctatccccctcttcctgtaggtttcttcgctactcaaattccacacactcctaaagtctaaatgaagtctattctgaacattttccaactattctctgtaaggctatttattactgcaactaccctacaacacagtaatgtgttaagttttcaccaaaatgcatcctgaatgtgtaaccaatgtaaaacattccagttaatgcatacatcaaggctgttttagaggatcaaatctagttttccaaactgcaaaattaataataaaaagcattgcatttcagactgtcaaacagctctggttccttatattacaagcttaaacattggtgaccagaatttaggcaagagatgttgcccctttagtcagttcctcaaaggtaataaaacacagagctcttttcattagaaaccatcaaagtaaaaactgctactaattgcaatagggcagtcattactggatgtttacacaagttctcgttgtgtgtatttaggaaacaaatatccccaattcgaagaaaatcgaagcaggtaagatacagtgatgagcaagaattcctaatcctaaattttgtcccttcctatgaaaacagtcagttcacagcaaagtggaaaatgtaccctgtgcagctaaagttgcacagtaccaaacaaaaggttatatttgatcagaaaaggggatgtgatttcgaaggaaaagggctaacatgcaaaggtcctaatgcgcttttctagtcatatttaattacttaaagctggactgcattacaacactgctacaacaaagactatgatctcccaagaactggagagctgttgtcacacaactacagtgctagactgctgaacaccatttgctggcctggaaaaccctgaattttaccacggatgaggtgtgtttttttgtttttgtttttttttaagtttagaaactagggactaagacacatgtagttactgaatttacagatctcccactgctgagggcaaccaaaaacacttcgaggatgcttctgaagtaactcctttaaaaacaagcaaacaaaaaagctctctaaagagccgcacgtgaaggcagcacatcgccggctcccggagtgagtcacctcctgggtgtggggagtccccagaagcgcagacacccgcgaggacaaaggggcaagggtgctgcctgccggggaccagagaaggcggtaaaaccttccgcctgccggcaccctccgcgatcgcctcgcacttcggggccacggcgggcgcgggcgcgggcgcgggcgcgggcgcgggcgggcggaggagagcgggagggcgggaagctggcgcaggccggccagaggcgcagtgcggctcctccgctcgcgacccgggcccgcgccgccgccccctcaccccacacctgccagcgcccgccgggcccaccctccgcccactgccccggcggcagccctggggacgagcggcggccacggtccgccacaagcaaggatacgaagtagacagagaggaagatgagcgcgcaacagtcgaggagcgagaagaggaacaccaccgcctccatcctccgccgccgctccgcccgtcaaaccagctccgggccgcgccgccgggacaggcggcatgccgggagttgtggtccaggaaaggctcctcccggcgcgatgcatgatgggaagtggagttcactagtgcccggtgagcgcaagaggctgagccctcaaccttagtgagatccacccactgactgctggtaacttagaaggagttcctcaccgcgtatgaattttgtctttctttccctttctatccatccttccttgtctaccattgttggtttgaggggggtctttgtttttcttttttggtggtggtaagacctcactctgtagcccaggctggcctctaacttgggtctcccagtgttgggaggacaggcctgcgcctccacacagggctgctttagtgtctactctctactcgcttggttgccgtaacttttcatctcaaatacaaatccaatctcaccactctgggctcaagagcgtgcccggttgcttgcctattgtcggctacagcaagctttctcatctctgaattttaagatctttacggaatccggtgttttactcaaccattcattctcttagtaaatagttctgactacacccctgctatacgtagaccaagaactgttttacacttcaagtgcagtaatgaacacagccaacaagtgctctggtgggtaataaggcaataaggtagcaactaaacactaaaaaaagaacttcggcaggtgacagtcttttgaagccaattacacatatgcatccacttatttaacttgtattttctgaacagctaatgtatgtgaggcactgttctaggccttagagatacaaggaacagacggaaagatacgcacgcgcctgtacctggcatgtgaagtgtgtgtgtgtgggggggggggagacaggaagtaaaccatatcgattaaaagcagttctaagcactttgaagggcgtgaggaaacacctgaacaccagcagagtccaggctgaggaactcacacagaaacgaaaacagtaaatgttggaagatttgcaagggaccaaaaaagcctaagaaattgagttttaagaagtcaaaggtactggagaaatggctcagaagttaagagcactgactgttcttccagaggtcctgagttcaatatccagcacccacatagtgggctcacaaccatctataagatctggtgccctcttctggtgtgcaggcatacatgcaagcagaacactgtatatttaataaatctttaaaaaaaaaaacaagaagtcagccgggcagtggtggtgcacgcctttaatctcagcactcaggaggcagaggcaggcggatctctaagtagagactagcctggtctacaagagctagttccaggacagcctccaaagccacagagaaaccctgtctcgaaaaaccaaaaacaacaacaaaaaacccaagaagtcaaaggcaaacagggcaagaacacatgggcctgggaggctttgggaggatattaactttgtgtaatgttttgcatctatttagtgtacataggcacgcatgcatatggggacgtcagaggatagcctgtaggccttagtttgctccctcttccacacaggatcttggcactgaactcacattgtcagcttggcagcaagcccctttactttgtgagccatttttccagcctatttaacttttattctgagaaaccaccagagagttttaagagaaaaattaccttgattggatttacatttaaaaaaatattgttaaaaatatattgtttaaaaatataatatgctctttggtgcattaaatgtgtgaaaggagaacaagcttgtcagtaagaggtcacttaagagagagacaacataagagaaataaaatgaaggcaaaaaaaaaactggatttgcctgacagcatcggaaatccaaagattaagggtcataggttaaagctataagtacagttaagatttatgtaccagattattattacgctcccactgtaccttgtacgtgcctctatctaatcaactgtctgatatgcctatgtcagttacggtatgtgaagaactgtactaagccttagagatacaggtgagtctgtaccttgcatgggaagtgtgtgtgtttggggggggggaggagacaggaagtaaaccatatcgattaaaagcagttctaagcactttgaaggtatgaggaaacacctgaacaccagcagagtccaggctgaggaactcacacagaaacgaaaatagtaaatgttggaagttttaccagggatcaaaaaagcccaagacagtagatggcttgctctgcttaaaaagcaaaagggtggggggggggggctggagagatgactcagtggttaaaagcacgacatgctcttccagaagacctgggttctatttccagcacccacatggaggctcacaaccatctgtaactccagttccaggggatccaatgccttcttctggtctctgaaggcactgcatgcaaatggtacccatacatatttgcaggcaaaacaccacacactttaaaaaagaaagttaaagaaaaaagtttttaaaagtcaaaggcagtcaaataagcatgcttagccaattattctccatagtgtcataaggtagcatattttgccagtttttgtattcctagtacctccactgtaaatagctagtgcttaataaaatggttacaaatgattatcagaagagatttgattaaaaacaaacctgggagctagatggtggtggcacatacttgtaatcccagcgcttgggaggcagaggcaggcagattgctgtgagtatgaggccagcctggtctacaaagagttccaggaaagccagggctgttacacagagaaaccctgtcttgaaaaacaaaaaacaaacaaacaaaaacccaaacaaacaaacctgggagctgaagacatgcctcagtgcttatgtgaacttgcttttcttccagaggactagggttccactgctagcaccgacattgtgactaacaagtgtctgtaagtccagttccaggggattggctgacgtctggcatctttgagcactgactgcttggttcacagacatacattcaggctgtagttggacgtttctttgggttgtcagttcacaaataacaacacagagactatattaaatataaaaccttggccttagctaggcttttccccaaatagctcttataacttaatctttttctattaatctattttctatcatatggtttggttacctctcctctgtattgtatgtccgacttgtttctcatcttggtggcacctcctgtgcaattagattctatcccagagttcctctttttccccagaagtcctgcccattttctcctgctagctaataattcagctctttattaaaccaatcagaaggcacctttgtctaattaaaaaggaaaggttttaactctaacatagtaaaactatacagtacgaacaattatcaggaaagaattatattcacaatgttcagtccatttgtatatggcatattcttatctatccactctcagtgggcccagaggtttgtacctaattaactttctatcatagctaataaactacaatgttgtgggatgtttgcttacactgggaatatgtgtctttgccaaggtgccttctgattgttttaataaagagctgaatggccaataggtaggcaggagagaataggctggacttctgggcaaagagaggaacttgggttgaatttagtttcatgaaagatatgccaggaagatgtagaacaagtcagatatatggtacagaggagaggtgaccaagccatgcagtaaaatgtagattaataaaaacaggttagtttaagttataagaactagttggggaaaaaacctaagctaaggccaactcttcataattattaataagtctctgtgtcattatttatgagctggcaggccaaggaaagtctgactacagcaggcaaaataccatatacacgaaataaaaatgaatcctaaaaataagaatgaacaaaataagacctgcctcagctggcaagatgactgactgcgtaaaggcacttacctataagctcgaactcatctgagttcaatcctcggaagccacatgatggaaggagagaaccaacacctctggacatatggtgccacacgtgcactgagtgcctgtacacacactaataaataaataaataaataaataaataatgtatttaataattaaaactggcttgctggagagatagcccaggggtaaagaccacttgtgcttgcagaggcgcaaagtttgggtcccagcactcacgtcaagaggctctcaactgcctgtgattccagttccaggggatctaacactctcttctggcctacacacacacacacacacacacacacacacacacacacacacacacactcacacaaaccacacacacacacactcacacacaccacacacacacacacactcacacacacacactcacacacaccacacacactcacacacaccacacacacacactcacacacacacacacacttacacaaataacaagtaaaataaagtcctttttaaaaattaaaaagaaacaacccacatctcatatacattccccaatatggaacagaaaaccctgaagtttctgtattctttgtttgaaacagggtctcaccgtgtagccctggctgacctggatggaactcagggcctgcctctgcctcctgagttctggggttacattcatcacactgggcctgttcattattctttatatatctttttatcctgagaaaatgtaaaagctcacaccgtactcaaccacaattattaaattaccattttccattatgatgagtttggtctcttattctacctaaaaactcaaagcatgattgcagtgtcaactatggggaatcaaaatttatgagaaggaaatgaccactatgaattcaaaaccatcctggtctacagtctaggccagccagggctacatagctagacattgaatgaagtattactcatacacaaaaaataaacctaagttttcttttttctttccttttttttttttcaagaagaaaaacagcagagaccaagtgtgttgacacaagcctttaatcccagcattcaagattagaggcaggatctctgtgagttctaagccagccagtcagggctacattatagaccctgcctcaaagaaagagagagagggggagagaggtgggggagagagaaacagaggaagacagaaacaagggagagggaaacaaaggagagagtgacagagacatggccaaaaaacccgcttcagaaattggttcagaagagttaacaaatgacaactacaagtagcaacaatgagacagatggaagggattgctacatgatatcaaaatgtccacttttcaacaaccaaaaaggaaaaaggagggctagaaagatggttcagaggttaagggcactggctgctcttccagaggtgctgagttcaagtcccaccaaccacatggtgactcacaaccatctataatgagatctggtgccctcttctggcctgcagggagaacactgtatgtttttctttctgttttattatttgtgtttcccactaggtctctggaagccatgtagtgagagagcctggtcctgctagttatcctctgaccttcatatgcataccatagtgcttgagcgtttccactcatacacacgtacattaaacaaatggacagaggtgtgtgtgtgtgtgtgtgtgtgtgtgtgtgtgtgtgcacacgcacgcgctcagccaagccagacatggtggcacatgcttataatcccaatatttaggaaaatgaggcaaggaagattgctgagagttcaaaggcaacagggccaagcagcaaggtggtgtctcaaaacaacagcaaaaataaaaagacagaaaagaaaaaaaaaaaaaaaaaaaaaaaaaaagaatggggtatagcagggcacacctttaatctcagcactcaggcggcagaggcaggtggatctatgtgaatctgaggccagcctgggtctacataggagctctaggacagctagagctacacaacagagagaccctttctcaaaaaccaacaccaaaggcacttcaacaaagcaaaaggcagcccctagaactagagaaaatatttttagatcgagtatttcatcagagattaatatctcaaacataaaaattcctaaaatacaacacagcaattacccagcaatctgaattaacaaatgccccatggaagccgggcatggtaacatgtccctttaatcccagcacttgggaggcagttggagctctgtgaattcaaggccagcctagtctatacagcaagttccaggacagctatacagggttgttatacagagaaaccctgtctcaaacaaacaaacaacaacaaaaacacacacacaaaaagaaaaagtcaatggagaaagaacttagggacattccccaggttatacaaatggccaataagcatgtgaagactttcatattactaaccgctaggaaaatgtaaatcaaatctacaatgaagtgatgcatctattaaaatgactactatcaaaacgacaggaaatatatgttgataaagacatgaaatacttgttattcaagattgttgttgaggtagggtctcacagaatagccaggaatgccctggaactcattaagtggcataggctagcctaaaacttgcagcaatattgttgcctcagcctcctgaattctgggattacaaaatgagccaaggtgttccccatgagtaattggaatccttgcacattttggtggcaatgtaaaattatatagttgccattgaaagcagtgtgacacaggagaatacaaatagcttgtttgtaaatggacatttctctcctacccaccagttcccaaataaccactcagaggcttatattcattacaaatgcttggctgacacctcgggcttattactaactagctcttatgtttaaattaacccatttctattaatctgtgtattagccattaggctggtggctttacctgtcctcctagaatcttgcttcccttgggactggctggcatctcccaatctgcacttcttcctcccaatcctcatttggattttcctgacaaactatcctgccttgctatataagcaaacagctttttttaaaaaatattattattattaaccaatgagagcaatacatagttatagcatacaggaggaccccacagcatttcttttttaaaaaatttactttattttatgtgcattggtatgaaggtgtcagatccctggaactggaattacagacagttgtgagctgccctgtaggtgccaggaaccgaatccaggtcctctagatgagcagccagtgctcttaacctctgggccatctctcagtccccacccccaccctggcagcatttcctggctgaaattccatttcactcaagtcagaaaggctgttgcaaataactaacaacaaatactggcaagaatttggagagaaaggaacgcttgtgtactatttatgggaatataaacttctacagatcctattgaagacagtaggaagattcctaaaatacggtatagttgacccacgcctaggtatatacccaaatgaatgactgtcagtacatgagagatgtccacataccctgattttattacaacactattcccaacaaagttaagttatagaaccaacctagacacccaccaagacatgactggattaaaacatatacatatgctaaggaatattctggtattaagaagaatgtaatttggagctagggacatagttcactggatgtagctcaattggtggaatgattgcctatcgtgtctgagtttgtttgtttatgggtttggtatgcagaactgaaaaattaagactaccaggcatggttactgtggtggtttgaatagatgttcctcacagccttgggcgtttgaatacttgtctccagttggtggttgtttggggagggctaggcatggcgttgcaagaggaagtttgtcatttggcgggggggggggggggggggggggggggggcggcctttgagggttcaaaggagtccttccaatttgaattagctctaggccttctgtttatgattgtgtgttctgtcagctgctgccccagctgctgactgcctgctaccctctgctccgccacgatggacagttagttatccctctgggaccgcgagccccaaataaacccttctgtaagttgccttggtcgtgtgatttacaatagaaaagtaactgacaacgcattctgtattctcagcgcttccccctcacgcccctcataaatccaactttaacaaccatttaaaccttattataaattactctctgaacaacttaactaaaaactgacaccagtaacaactcagaggctcctacacatacccactgcaaaaacttttatgcaggactctcccttggaaaggccaagaaacccatactcttgagttttatctcattctttccttaagtatttattaaccaccgagcttgactgttaaaaagtatgttttaataaactcctattctgcttcatattggttcttcctgacattctttcctgtaacaaagtcacgcatcttggttttgcctgaaaagacgtctctaaggggaaaacgcctcaggctgcagagtgggttctaaactgtcaagctttcgcagtgagaccctatctcaaaacaaaacaaacaaacaaacaaacaaagccactaacatgttgcggttcccagcctggaacgtgacaaacccaaactttttttgttttgagacaccatgttgctacttggcccagctgcctttgaactctcagcagctttccttgcctcggcttcccgaatattgaaattagaagcctgtgccgctctgcctggctcaacaccgagtttactacttgcttgtgagagtctgcgcagccgcagaggttggagtccgtgtccgtttgctcagctgggaaccaataaagttgaaggtcttcaaagtgggtctagccgctcaggccctgttggacaatcctgaaaaagatccggattagaaactcgcgcgcaattccaggtcttctcttactcctcagcagcgcagtccttcctattcactcgcggagctttcgtgctgaggaggaggaggaggaggaggaggaggaggaggaggaggaagaggaggtgggacacttccggtgccgcgggcgctgcgtttccggtgcgcggggaaggcggctgcgggaggctctcacggtcacgcggggtccccacgctggcaccggcagcatgaagcccaggcctgcggtgttcgtagacgggaagctgaagcagcgagtcatccaggtgcgtgtgtgtctcgggaccctgcgtctccgtcttcgcgcggctcgctgagttccggcgtgctctgtggacgcttgccccgtggaggccgattccggcctgccctccccgtggaggtcgggattccggtctcctctcaaaccacgacacgggtttccttccagtgcccataactcagacgtgaattgctcaggggacaggtaaaagggagcctgggtgctttgccagcgccgtcttttcctggctggggcgctctgtgtggcggatgccgtcagtgatgccggcagcaagcatcacgagttaaaaggagggagaggttttattactgttggcttttactgagacagcgtcgtacttcgtgcgtagccctgcctggccggggattcgctgcatagatagaccaggcttactaaccctacggtctgcctgcctctgcttctccagtcctcggttaaaggctctgccaccacgccccgaaaggcatttctgtttctgttccccccgaccccccgccccagacacggtttctctgtgtatccctggctgtcctgaaactcgatctgcagaccaggcttcccttgaactcagtgatctgcctgcctctgcaccaccaccaccccggctatcttgaattcttcatatccaagttccagacagctttgtgagtgacagatgtcaaacatttgctgctgtattcgtgtgtgtttcagaatgcaggatgtatagcaagccctcactatcttaaagatattggattgtagtagcggctaagtagttaattaaaatttccaaaccaggcagtggtggcacacactcaagaggcagaggtaggtagagctctgagtttggagttcaaggccaccctggtctacagagtgagctccccgaacaggcagggctacacagagaaaccctgtcttgaaaaacaaaaccaagccgggctttggtggcccacgcctttaatcccagcacgcgggaggcagaggcagccggatctctgtgagttcgaggccagcctggtctccagagcgagtgccaggataggctccaaagctacactgagaaaccctgtctcggaaaaaaaaagaaaaaaacaaaaccaaacaacaacaaaaatccaattacagatgtggcaatttaaaaaaaaaaacatgtttgtgatatgttgtgatatgcttttgtattttgtggtacactttatattcctgaagaatttgcataaaagtatgtgttggaataacgaaacctcttaatttactgattgaaatcccttaagttaatatttgtcatattttctcttttagtacctcaccagtaatagatgtggcaaatatgtagacactgcagtcttagcatctgacttgcaaagaatgtacaggtaaagaaatttacttctaaatccttgcttttttttgataccccccctttccattttaaatattccatcttgctcaatttttcaattgatgtcagtggctgctggtattatcttaccaactcataactccccagagttaactccttttaccacaggaaatggctcctttcttttattgtctcttccattggcctggagatagagactgctctattacttcatttcagcagaaaattaaaatcatcaaccgtgttcttcctcaactctcaggctgccccacatatgtagcttcaggcaccaggtgtgtgtcagatccccaagagctggagttgcagacagttgtgagctgcctcatggtgccgggaattgaacctggaccctgtggaggagcagccagtgctcctaactgctgagccatcttcccagctccatggtctcttacttttgtacttgaggttggcctgccattttctgggaattctgtctctgctttgcctccctgtacctaccttcatgtgagtcttgggcattctcactcaggtcctctcacacttggacagcaaacgacttatctacttcgccgtctccctggccccatttaccttattggaaattttaaaaaattacatttaatttatatatacatgtatgagagaatgagagagagagagagagagagagagagagagagagagagagagcacatgtgccatggcacacctgtgaagttgagacaacattgcaagagtcagttctctcctttcaccatgtggtcctggggattaatttatagtcaggtttggtaatatgcatctttatctgccatctaaccacctccaaatacctttgttttttgttttgttttgtttgagacagagtctcactgtgtagctgtggctggcctgtaaactgtgtagaccaggctgtcactgaacagaccaagatccatttgcctctgccttctgagttctggaattacaggcattcaccaacattcccagtatgaataatttatatttggtaaagacatgtcacagcactcaggcagaagcaggcagaactctgtgattcccagacaaccaggactacatagagagaccctatctgcagaaaaataaaataatttacttgtaaatcacagatacacactgttcatcaaaacgtttgtgtactatctttagcatataatcttaaatgtttgaatctgaatttaataatgaagaaatgttagataaagctagataaggagaattttaaaaattcctattctcttctaaattaatgtcagtatcattagtaatagcctacacctataatcccagtactttgttgcaattctgagttttagtctatactggactaagtagcaacattgtcttcaactccaaaaacaaaacagaaatgtcagtgtaactgtgctgccagagcagcatttaatcccaatatttaggaaacaggtggatctcttagcaagttccaggctagccagggttacaaccccctgtcttgagtataggtagaagtacctatcctgcccaccagttcccaaataacacagaggcttaatattaataataaatgatctgctgatagttcaggcttattactaactagcttttacaacttaaattaacccatttctattaatctatgtattgccacatggcttgtgactttacccatcctacaccatgtcttgctccctctgtgactccggtgactcagcccttccccccagcatccttaatttggttgtcctatacttcctgcctggctactggccaatcagctgtttattaaactaatcccagtgacatatctttacagtgtacaaaaggattattccacagcacttgaggttgagacaaatggccccattttgttcacagagtgacacttgacagtttatcagtataacattgcaagtttggtggaaaacatttgtgaaaactgtgtgctaaaagaaaaaaaaattttttttcttcccagtgtagattatggccgaagaaaaagaaatgcttttaggattcaggtagaaaaaggtgagtcttttgctgtttgagcagaattaccacatctatgcaaataactgttttagttcatggcattttatcttatttgttgcagtatttagcataattagtagtgaaaaagaacttaagaatctgaaagaattagaagatgaacatctggcaaaaagagcaaggcaagatgaagaggatgagtaagtattgcaaagtgttttccctgaagtcctacattcacacttggaaaacttgcagtggctctttttggccaaaagtgcaattatacctgaacatttttctaccttacattgtcttttcctccagctatagtgattgttctgtattgctaaagacattttgactggtttccagtagcttaagtattcatatctatttcacaaatcccactcagccttcaaaagtcagtgaagatgtcaatcttggccttcttagatcccttgtgtgtgttttcttaacatctggttatagagatttactataatctttatatcatctggcattgaaattgtttactgttttgtattaccaacacagttgtctcctgttattttttgctttaatataatgccaggtatattaaaagaaggcagtaatgttaatgtttaaatatgttatgactggggtactcatgttaaaaatgcaagcttttttgtagctggattgatgatggcttagttctttcagaggaaccaggtttgattcccggcggtcatggctgctcacagctgtctgtaactacagttgtagagcatgcacacatggtgcagaaacatatgcaggccatgcacctatacacggtacacacactagaacaaagcaaatggtggagcattccttattatttgatagataaggaagctgacactcagcagcattaagcacagggttctacctgtttgaatgaatttctttacttttagtttagttttgagacagggtctgtctgttgtcttgaatgtccttgaactatctaggtaaatgatgttggcttcagctcacagagatgcagccttcccctgcctcccaagtgctgggaataaaagcatacataaccacacttagctgtttaaaatgggtttttaagtcccattttctttaatcatattactctttttcctgagatttatttttattattttgatttgcttttgggttgatttggtttgatttttttgaaacagggtttctctgtgtagctttggagtctcctggcacttactctgtagaccagactggccccaaactcatatagatctgcctgcctctgcctctgcctctgcctcccagatgctgggattaaaggtgtgcaccatcaccaccgggctagtttaaaatctttaatgcaatgtgttttgattgtgtttttcccctctcccagttcctcctagattctccccacccccctacccactcaatttcatgttctttttctccctcaagcaaaaaaaatgaaaaccaaaacaaacaaaaactagtaagattagaaaaaaaaaaatgccaaaactaaaggccacagagaaaccttggagttcattatgtgttagccaactaactcctcccaaacatggatctttccttggagtgtggttgatttgaccagtgacactccctttcctagtagatttcaattggaattaacttttcatgcccacttccctttccagtggtgggatcttgtccagtttgaaccgatgcaggtcttgtgcatgctgccgtagtattctctgtgatttcataattgcattagtccttttgtgtctggaagactgtttacttggagtcatccaccacctctggctcctgcaatctttctgcctcctctactgcgtaggtccctgagctcttttggggtgggggtgggggggcgtagtgtgaagacattccatttaaaactgagtgctcccaagtctctcactgcatatgctctggctgtggtctctattaattctcatatacaaagaccctctgatgatggctgagtggtacactgctgtgaggtttgttttgtttttatttatataagaaagtgtgcctgtgttagtgggtgccatatgtaggtggagaccagaagagggcatcgtatcccttgcgagctggagttagaggtcattgtgtgaagaaccaaacttggtcttctgtaagtgcagtaagtgctctgaaccagctcttcagctctccttcagtctctttttgttgttggggtttcgttttgttgtttgctcagacatggtttctttgtgtaaccctggctgtcctggaactcactatgtagaccaggctggcctcgaactcacagatatcctacctctgcctcccaaatgcagggattaaaggcatacgcaattactccccacctagcccttggactcatcatgttttgccttaaatatattgacttatttgggataatcattttttgggttaccagagaaaggctttaaaacattttaactttctttctcttgctcactctcttttttaatccgtaggtacactgaaagctattctgatgatgattcaaacatggaagattacccagatccacaggtaagctacacattcaatgagcccactttgatttctttctttcttttaagattcctgtattttcatgtatgtatatgactgttttacctgcatgtctgcgcaccatatgcatgtctgatgcctggggtcagaagagggcgttggatcccctggaactggagttaggggccaccatgtgtgtcctgggaactgaacctgggtctctgaaagagcagctgatgttcttagctgctgagccatcattccagccccacttttttttccttactcattatgaacctctcttagaagaaaagtcaaaaatagaatgaaggaccttgtccatctttatcaatacataattgaatgattcctgtacacaccatcaatgctttaatcttccttccggtacttatgtttgtataatgagttatatgaaggaaaaggagggaaaactaaaggtggattagaatagtaaaggaagtagtaataaaacagaaactcagcaggtctgtgtcacctttatatctcagtacctgggaggcctatgcagtcagatctttgagtacaaggctagcatgttctacgtaccacattccaggctagctaggctacataaatggccatactttctgcctgggaggcagcattactgatgccaggcctaaataaaaagatacagcataatgtgccaagttacttatcagttgcttcttagttttccctctttggtaaatgaggctttgaatttattaacagtgattacagttctccgttaaatttgaccctgcattgagttgatgactcactggttaccagtccacttcctatctcttcattttatttaatcacgaattatgaattggcctggttctctgttaccttagagtggttacagtagttttgaagagtagaagcttgtttgggaactaactaaccaatacctgtgaattccgactgtaaatattgtcagagaagttgtttaaagtaaaatacacaaagctttttagtttaggtactggagctttaatattgcatgagtaacttagactaaaatcatgtttctaccagtcagcaaatcacatgaacagttccctgctatctttgtatcggaaaggaaactctgactctgtttcaaacactccgaagttggaacagagagaagccaccacttcaacaccattgctgacttctaaaatggactccatgccattgaagacccctgccagagcatctgagggaggatggttcattgacaaaaccccaggtggaaagaaagaaagtcttcccttggacctgtcagatgaccaaagcaattataagcagccagattctgagatacaggtatttttatagtgagaatttagttccatgtattggagtgtattgcagtcttttcattgaatgtagtatcaaactaattcttaaaactccatcttcttttttttttttttttgctgcttctgtcctagtccacaacctttattgctttaactattgaatagatttccaagtgtaatctgtgtcttgttactctactctattttcacatagcggtatcttttcacgaagttgggtactgccatctgtgtcagacttttaaattcagtgagaaatgctcagaaacagtttcaaggaagaaggacctattggggcgagctagcgttgcttctaggcctgaggtgaggtgtagcagcatggtgaaaagaacatggtagagcctagctgctcacctcattgaaccatggagcagtctcaggaagggacatccaccactccccagtgaccctttcttccagcttggttccacctcctaatacctgttcagctatgcactcaaacggtcagtccattggtgaagctagtaccctcgtgatcctgtctccacccagggactgaatttttaacatatgaactgtgggatacttcatacccaaaccacaataccatcctactatttatattcctttagtggcttcattcagtcccagatcaaaagccacaaagccctgtatgatttgttcaccctgttgtttcttgatgtcactgtttgtctcccctgctgttcctcagtgacagcaagttcttgctgtttgtagagcactaaggtctctctcacttgggatgttagcacctgaactttctagctagaacactttctccagacttctttacagccctttctcttgtaatatctagagaaccttacacgccatggagttaaattgtaatgtacctgctgtttcctaagtttctcactcttgtgtgtgcctaactgcgtgcacatgtgtaagtgtaacataccagagattaataatgtcagatgttttccttaattgctgtccacttcttctttgagaaggaaaagtcagctgggcagtggtgatgcatgcctgagttcaagctatcctggtctatggagtgagttccaggatagctggggccacctagagaattcctgtctaaaacacacataccacacgcacactcatacacatactcactcaggtagtagcagcggtggtctcaaagtctctcactaaatctggggctttctgattcctctagcctggctgaccagcaagctccagggaaccgcttgtctttgcctccatggcactggcattattgaccaccctattacagctttgtgtgtgtgtatgttgggggagggctgatttgaacttagttctcatgattttatgataatgacttactgactgagccctatctgtttgattttgggtcttggaatagaatctcttgtagtctagtacaacctcgaaattgctgtatatctaagaatgctcttaccttttgatcctttcagtttcaccccaaaagtcttgggggtatgagttttccttttatattattaatgggcctttccccaaatatctttgttttaagctgtaactattcatctatgaagagcattattataattggtaagaacctgatgtttatctgcattaagtctttcagacaagattaaatttaactgttcaactggcagagcctgcaaagaaagttatcaaatgttaagatttaagctgtgcttttaggtttctgaagaaaggaagcatccttaagcaaagaaattgtcaatagttagcagtgctaaagcacaagtaagtgtgtgtgtgtgtgtgtgtgtgtgtgtgtgtgtgtgtgtgtgtattactgcctttgaaaaaccatctgttagcattgtaatttgaagtacaggatacataaatttgtattttctttccagaatttaaaagattcttctcttctggaaagtgataagaaaaggaaaggtaggccaaagggcaaaggaaacaaaagaaagacagagcatcttcaagaagtagatggagaagtagaagctgttctgcagaagaaaggtgagttatggagagtagcagatggcagtggtgtgtttgctttgaaagagggctcactattttgagttgttttgcttaagaagtatttgtgtgtgaaaatgcctagttgaaaacattttttttttaacctaatggagctttaattatatgtttgtgtggaatcactaatcttttcacctcttttgttttttaccagctaaagcaaggagtatagagttacagatttccagtgtgaagtttgaagatgttggaggcaatgatgcaacattaaaagttagtgccaattgagaaatggcattacatgaaatgggtatattgttaaacatttacacatatgaagcctgtttggttttcatttaaattaaaaaattatgtatataggtgcttgcatgtatgtttgttatgtacatagctgcttgcatatatatttatgtaccatttgcatgcctggtgccctcagaggctataagggagtgccagattccctggaactggtgttacagaccatggtgagccaccatgtaggtgctaggaaacaaacccaggcctgcaagagcagccagtgcccttaaccactgggccatctctccagccctacatctttggtttttagtgtgaagtgagtgtagaaaagaagactgggaaggtgagatgggcaaacctggtccttgaggttgccatagagaaagcttcttgtctttcatgtttttatttctagtgtgtataaagtgcatgctttataagttagactgttctgacagtgctaatgtaatcactactgttttttagtgtcccctctgttagttacttctcgtggtgttttatgaggaagatatttttacagcttgggaaacagaagcatggagatgtcgttgaagtgatttacacaatatagcaaagctaggtttcaagcttaagttaaagcctaatgcctgtattctacttagtatgatttggtgttccaaaacaataggacatcacattctactttgcctctttctgacttgggctggtgaagataccttctatgcatattccttgacaggaagtctgcaaaatgctcatacacatgcgccacccggaagtataccaacaccttggtgtcaccccgcctcgtggagttctcttgcatggaccaccaggctgcgggaagacattacttgcacatgcaattgctggggtaaggctagttgatgctggattttaatttttttgtcattatttttctctttggtcgattccaattagacctgatatctttttaggacgcaaacttgatgagtaagaaatttcccttcctcctcctctccctctctttcttcctcccatatctgcttcctcgttgtctttttgttgttgttttaagacagggtttctcattgaccctgatcatatttaacttggctagactatctggccagccaactctggggatcgtactggggttacagatgtggaaccccatcagtgtaaactcaggttctcatgctgtaagcactttacagactgagccagtcccagtcccagctttattttatttaccttcttcatgatgctccttttgctggtttttttgtttgtttggttgattttttttttcctggctgtcttggaactctctgaagaccaggctagccttgaactcagagaactttgtctgcctctgcctcccaagtgctgagattaaaagtgtgtgccaccaacaccccttttgctgttttttttttttttaatgaatataattattgtgctatgacagaaattggataggaagcaaaatggcatacctataaaaacactttccaaatatttagtttacattttagtaacttctttactctttatccaagtttttcttaaaagcaccaaaatatcgggggctggagagatgactcagagattaaaggttgcttttccaggggtcttgagttcaattctcagcaaccacatggtggctcataaccatctatagtgagatctcgtgccctcttctggaatgcaggcatacatgcaggcaaaacagtgtatacataatcaaatcttttttttttttttttaaagcaccaaaataggaaaaaatagtattttttttcttgaagttaaatttatttaaaatttctattgttaaaatgccttctaaaatagttttaaaagatgacttaggcatggtaatacacacctgaaatttcagtatttgtggcattaaggtaggattgcaagtttaactcttctgggctttaaattttgtatagttctttccatccctgtacccacaaaaatacaattattttgcaaaataaaaagctagcaattctaattttgtcctatcaaatttttcagaaacttaacttcatcgtaaaatgcaaagtaatcgaaggagcttcaactagcagaatagcatgttattctaatcattaatagagcaagctctcactttttaaagggaacttgatttgtctttttaaaaataaggttattttagctaggtggtagtggtgcacgcctttaaaatcagcactcgggaggtagaggcaggtggatctctgtgtgtttgaggccagtctggtctacagagtgagttccaggatagctaggactacacagagaaaccctgtctcaaaaaaccaaataaataagtaaatttttttcatgggcactgcatagcagaccttggaacatactgtttgcatttatgtgtttgggtaaatccccaggtttccaggcagccttgaactcaaagctttagtggtgtaatccactctaattggtggttaaatccatagacttcagttttttgagacaaggtttctctgtgtatccctggctgtcctagtactcactctgtagaccaggctggccttgaattgtacctcctgagtgctgggactataggtgtgtgccaccaccgcctgggcgactgtttgtttgtttatttagatttatttattggttatttgtgagtattttgcctgtctgtgtatctatgcaccatgtgcatgtctggtgtccatggaagtgagaaaagaaaagggtgtggatcccctggagctggagttacaggcagttgtgagctgccatgtgggagctcttaactcctgagcccatctctaaattttagagtagtgtgggtcgttgcacccccacacaaagatggagttccttggggaattgtagaggccccaaagatagttccaggggtaaaggtgccccccaccacacttgatgaccaaccctgtgatgaaaccagaaacaaacaaggtggaaggagagcaccaacttctacaagtggtcctctgacctccacatgtgtacaatggcacacatatgcctgcacacatacatgcctgtacacgcaaaaataataaatattaaaaaaaaatgaagagatgactcaggggttaagagcactgactgctcttccagaggagcttgggtaaattcctagcatccacacagcagctcccagctatctgtaattccacttccagaggacctgacactcatggcaaaaaaaaaaaaaaaaaaaaaaaaaaaaaccagaaaactaattgtgatggggcagattgcctaagaaaagtgcagggtagttaaattgtatttagtctttggtcattcttttctgtattttacacaggaacttgacttgccaattctgaaagtggctgcaccagagattgtgtcaggagtttcaggggagtctgagcaaaagctcagagatttatttgaccaagctgtggtgagtcacctgttgcctacgccctttcgtcacttgctgcaagttttcttagagatttggcttttctgatgctagtattttttatcccacttactttccttttgtaaaaatgttcagttgtaaaaatttaaagaggatttaattatacagactcttagtaagtaatcatctgattcatatgaagtcagacataaggtctgactgtcgtacctgagagtcaaatgttcaaaacatcttgtccctatgatacgttgttcactttgtttctacagcttatgtttgactaaacaacttataaacacatgagtattatcatacttaggattatgcaagcactgcaaaactcaaggataaacgtttatatgattagaggtatgaaaaggaatttcacttaccagggagagaaattatacctaactacaatttctgttactaaaatttataagaggctatttggatccagtcgaagttatatcttcagcgttgtatggtatttaaatgtctatgctgtcatccaaaagttgaagactaattcagtgtgatcacatatcatgttgtgaaaaagacccatccactctactcttgttcctaatagtaacgtggcgatgatgacaatacccacctctcatggagtttctgagtgtttagatcagaagattcatgttctttcagatggtatattgccatgttgtctagcctggcctttcattcctggccaagcagccttcctacctcagcctcccaaatgctgtgcttaagctatccaccaccatgcccagttgaaagacttcttataaaacctttaacgttgtgtctcgttgagcaagagtcctgtaagtcatgacatgtatacttgggcagacatgatcatcactgtaactaaaactaaaaagtgatgcaaagtttttcatgtcatgttcccttcctttcctagcccttgcagacagggtcttatgtaacccagtctgacctcagacttgttataactgtgggtgactttgaacccctgcttttacccagtgttgaaatgacagttgtgttccaccacactggatttaatcttacatcttatttgcatctaaacatttgtctcataaacataaccattgtaactactagaagctgatgtgaaattaggagagaaatgtattttaacagcaataataataattaatacatttgtaataataattattaaatgataagaataatttattaatttttgaaggtgtctcactgtatagccctagttaacctagaacacactatgtagatcaggttggcctgaatcttaacacagcctgccttgctgtgttgtgtcaccatgcccagcaagggaaatgtttttaggggggtgggaagcaatagaggctagctgctgggaactgttgtgtagactggcagcaaagtggatagatggtaccaggaagacccagagaaagcatgaagatgacagtgttggacatttttctaaatggtgtacaaatggtacacataactgtttgtcttcgtcactgttctgttgctgtggtaagatgccaggaccagtgcaacttacagaagaaagagtttacagtctcagagtcagcctgtgaccaccatggcaggaagcatggcagcaggtagacaggcatggtgctggcacaggagctgagagcttacatcctcatctacaaacatgaggcagacaaagctaactgtgaatgaccacacctcctaatccttcccaaacaattcaccaactgggaaccaagtattcaaatatgagcccagtgtatgggtgggggtcattctcattcaaaccaccatggaagattttgtgtttatggtaaacacaatggcaagtatggatacaaagacaaatgccatatttaggtcattagttctctgtttgatctctctgtactagtactgagcaagtacaatgttgatgcaggtattgagtaagttccctgccacttcttccctagtccaagtgagtaatggaacgtggtcaagcaagggagtttttttctaaaattagtcccctcctgagggtaagttctggtcatcattatttattctttcccatttaattttccaggtcactgagacctttgctctgaacttttacttttggtggggttttttttgttgttgttgttttgtttttgtttggttggttggttttttttttttttttttttttcgagacagggtttctctgtgtagctttggagcctatcctggcactcactctggagaccaagctggcctcgaactcacagagatctggctgcctctgcctcccaagtgctgggattaaaggcgtgcgccaccaatgcccggttttactttacttttgtaactgatttttgcaaacattgtcatgaggaagattggggaagacagccagtagtgatgacactttagtgtcattttgaggtgatcttgtgtgacttttagcacaataaatgtctctattttgactatggaatgaccaagtatgattgaggttggaggcgtaggtttttgtgtttcgcttaatccttattctctctcccgccctccctgtgtgtgtgtgtgtgtgtgtgtgtgtgtgtgtgtgtgtgtgtgtgtttgtgtgtgtgtgtaaaaacttatattttataaaatttactctgttagcctctttgttgtcattgttgagttagagtatcaatttgtattccaggctgccctcaaactcatagcaatcctcctgccttagtcagtgctggaattaccagcatgaaccattttaaagttcttgttacatttaattataacgtggggtagtgcacacatgtgccaaggcacatgtagcatgtagaagtcaggggacacctgatgggaaccagttctcttatctataatgtaattcccaggaaactctggttctccttggtgacaagctgccttccttacccaccagacagcactatcctgacatttgtgaacagtcatcaccacccaccctagaactttttcatcttcctcactccctctcccaccctcccccaggccctagcaaacactagtcactactgtatgtctcagtggatttgactatagtaagtggctagtgttttatttgtttgtttgtttattggagggggggtgttccaggcagggtttctctgtagctttggaggctgtcctggcactaggtcttatagatcaggctagtctggaactcacagacatccgcctgtctctgcctctatttatttttttactacgttctggctaaacttaactatctagtatatgtaattttcttttttggttttttgagacagggtttctccgtgtaacagctctggctgtcctggaattcttgtagaccaggctgctctcaatctcacagagatctgcctgcctctgccttcgagtgctgaaattaaaggcatgagccaccaacaccatccagccaaattctgacattttttgtgttagaggaaaactcctctatcatttgagcaaactgggattttctagtttgaaacttatttttatttgggaggggggagtttcaagacagagtttctctgtggctttggaggctttcctggaactagctcttgtagaccaggctggtctcgaactcacagaggtcctcctgcctctgcctctgcctccccagtgccgggactaaaggcgtgtaccactaccggccggccttgaaacttatttttattttggttttgtgaaatggtatctcatctagccagcctgtcttggagctagaagtgttgcgtaggatgtccttgaagtcttgatctttccaagtgccagaaatattagcatgtgacactaattcttagtttaaagcttttaaatgtactgcttatattctgtagcaagcagatatatctcacttacagaagatacttcagaaaccatgatgcactcggtcctttaagcatcttggttctcttgggacatagcactcagaagcatttctgtgaacagcctctccatagtttttctttgatgactgatcttgagctttcactttctaaagaatacataaacgttatgcactaatatagagaatttattgtatagtcatatctttatggtattttcatttctagtcaaacgccccctgtattgttttcattgatgaaatcgatgctattacccccaaaagagaagttgcttcaaaagatatggaaagaagaattgtagcccagcttctaacctgcatggatggtcagtttaaaataatgaatttcttttaagatatttcttaaaataatacaagtcatatgtgcatgtatgaaccatttaaatagtgaatctcacaaaacaggatcttttttgtagaagatttaccagtcatttcaaattgtttcgcactgtgtgtgtgtgtgtgtgtgtgtgtatctgtgggtgcacatatgtgtgccaggagtctataccagtgtatgtgagaagggatcccagaggtcaatttcagatgacattatttaggagctatcattagttgaactggcttggtgcttgacaaataggctagggtggctggcctgtgagccccagggatctgcctgtccccacctccccagcactgggattacaaatgtgccatgttatatgcattttttaattaattaattaattaattaattattggtttctctgtgtagctttggagcctatcctggcactcactctggataccaggctggcctcaaactcacagagatccgactgcctctgcctcccgagtgctggaattaaaggcatgtgccaccaacacccggcgcattttttttttttttttttttttaatgtgggttctgggaattgaactcacaacatcatgcttatataccaagcattttttttgtacctgagccatctccccaactctgtagtaattaaatatgcttatactaatattgttttgcttttgctgtctacaattttagggtacctactgttgtcccttaaggatatcattgggagagaaatgttaaaattttaacatttttgcattttaatgcgtttatattaatctcttagaaaaatatttttacttttgacctggtgtggttttgggtgcctttaatcccaacacccaggaggcagagacaggtggatctctgatctcaaggtcagcctggactacagagtgaattccaggacagccagagctacaaagtgaatccctgtctctatccccccttccacaaaacagtattttaagaatgtggatatgtggaggtttgcattgcctgaggaggccgtaggatcccttacagttactggtcattttgagtcccaggcctgggcatttgaaaccaaactggggtcctgtgaagaacagtttgagctcttaactgctgagccatttctctaatcctatgttcaccgcttgttaactgctaataatagttttaagtttactgtgcagatttaagtatatctaccaatgtttccatatagagtttgaggccagcgtgggctatatagtgaatagtccagccagggatatgtcacgaaaacaaacaaaaataagaaaagaaatagcacatattttggtgtcatattcctataatctattatccgagcacatagaaagctgtgacaggaattgtcatgagttgtaggctaggctgggttacatagtgaatttcaggcccagcctggtcttacaggtgagaccctgtctcaaaacaaaacaaaaaatacaaaaggaaagttaatttgaaatattacataacatagtatatattatgagttttttgttttgttttgttggctttgttttttttgttttttgtttttttgtttttttttctcttgttttggtttttcaagacagggtttctctgtgctttggagcttgttctggaagtctgtagaccaggctgacctcgaatgcacagagattcacctgtctctgttgtctcctgagtgctggcattaacggcatataccaccactgccttatgagtgccaaattgtaaattacttgtagttttccttttgtgcggtgccagggattgaacctgggtgtgtgccctgcaagctctctatcattgaattacacccctagtaccctatgctgtttcattttcatcttaatttttttctgccatgtttttgaggcctacattctgagaacagcttttcatagattcttgctaatcaaatactgtccattatttacaatgtatttaccatttgggtaccaggataacccagactctcctatttaattctggttcagctaacagaatacttacaaaggaaaaactgataggatacttgtgaaagataaaatttaagccctgtattctgtctgttcctaaaaaaatctgtctctaacgtaagccagagcagcttgggttattctgtaccaccatctggtcctctcccatccttttgagacaacattgctgacttactcatcccccactgctgggccgctcacactgtctgggtgtgccctgcatgtttgcctgtgtgctttcactcatgctgctgttcactgtagaacttgagtaacttagctctgcttgtggaaacgatgcttgctctctggcatcctgcagggtttgtgtctgtgaaacctccatcattccctctcttgctctattacagtgctgggtttatcccaattgctattaaactccttgaaacttgtctttcattatgtttccttagttatacatttcatattcctcagtagacctgctaattgctggtaagaagggcagtctttatcttcttcacactttcactgtgttaggcaagaattgctttatatatcaaactacacagattctgtaactttttaaatgtttatttattgtatatacagtgttctgtcagcttgtttcctacaagccagaagagggcaccagatagtattacagatggttgtgagccaccatgtggttgctgggaattgaactcaggacctctggaagagcagccagtgttcttaacctctgagccatctctccattcctctgtaaccttttaatggtttttgtaaacattgtttttcaaatgtcagatggcttattctcttttatttctggttctcactagatctgaataatgtggcagctacagctcgagtgctagttgttggagctaccaaccgaccagactcgttggatcctgctctgaggcgtgcaggaaggtttgaccgagaaatatgcctgggtatcccagatgaggcttctagagaaaggtatattcttatagaatgatgccactctgtgagctgagcaataaaaatagttttaaaaataaatattaacaaaactatgtagtatttgtttgagctctagtgtactctatctcatgtctttctttctctctcgtttgttctttttcttctcccccctggtttgagaattgaactaagggcttcaaatgtgttggcaagcagcctaccattgagctgtatttccaggccctcttctcgttttctctctctaaaactgatgtggaaaagaaaaaaacaatgtttaatgaaacaactcactcatcaataggacatttgttttaggttgttcagtaatggtaatcattgtttgttgattgctgtttgtctgatactatcaatggagcatgtgttttagttggctcaccagctaaggggcagtgtctatacctgtagagtagtgtggtgccatctgatccatattctggttaagtctgaagaccattgcacttgtctgcctgagactgtggttctcataaaaaagatgctgacgaactctgcctggtgattggtggggaaagaacaaagagctatacaccaagaaccaaaaataaaaccaataaccagaatgtttttgtttttttttttttacattaatgatagtttattatatcatggggagagtgagtgagggagaaatagaagaacagagtaggatagagagtaagagagaagagagacagagttaatggctgacggcaatggtcggttgctagagagagagccagaatgctttaaggaaaggtagtagagtagaaatatagtgaattaatgctgtaaactataacctttatggttttttttctggtagttgtgatactaaaataatcactagcaacttttaggaaaagtaataaataatgaaaggaaatcattgccttagagggccaggaagggtggagactgtggtcagaaagcactgtgtgtaggctcagccacaggtctgtgctgtaccttccttcttcccaatgttagatgtcacttcatttttctttctttctttctttctttctttctttctttcttttttttaaagattttatttatttattatgtatacagcattctgtttccatgtatatccacacaccaaaaagagggcaccagatctcataacagatggttgtgagccaccatgtggttgctgggaattgaactcaggacctctggaagatcagtcggtgcccttaacctctgagccatctctccagccagtcacttcatttttctaaaataatgaccattcaacagtttctaagatgttgacttcataattatttgtatagataatgcttatgttcatacatattcttcagaaagcttactgacagtttactaatacttttataatctccatcaaaataataatattcatattactcatttatttaggacgtgtagagcagccaagcaacatggtccacacctgtagtctcagagctgtgactcaatgcagtggtccacaccagttatctcagagctgtgattcaatgcagtggtccacacctgtagtctcagctgtgactcagtgcagcggtccacacctgtagtctgtagtggtccacaccagtaatctcaggaagtaaccccagttcggcctcatagtatcctcatgccaagctttagctttacacaaaaatgatgattaaaaaggtagcttactttgtgtgtgaaatagtaataatgctttagctgtaagagttgtgaagagtgaattaatgtaacctagcacagtgtctttcttaatacagaaaaaaaaatttagtgctatgctgggggttgcattccagagtcttgcaccatactagatgagtgctttctttttcactgaactttgccccagccctagaagtgaagttttaggataacgcattagtttatctttgatttatttgtttaatgtttattttacctatgtgtatggttttgcaccacatgcatgcctgatgcccatggaggtagagagagggtgtcagatctcctggaaagtagagttacacacagtttttgagttgtcagtgggtgctgggaatcaaacccaggtcctctgcaagagcagcaagtgctttaaaccactaaggcacctcttcgtacacccccaaaccctaccttttgtttcctacatacatgaaaagagagctatcgtgtacctgcactgccctctcttctactcagggaactgaggcagaagatcacttgagctgagggatcagaattagccaggaaaacacctgcaatcctagtacttgggaggtggaggaaggagggttgagttgaaggccatccgtcactatatacaagggttgagttgtatgagactctgtctcaaaatccaaacccctggagctgcagagatggctcagaggttaagagcactggctgctcttccagaggtcctgagttcaattcccagcacccacatggtggctcacaatcatctgtaatgaaatctggtgccctctagaacactgtatacataataaacaaaatcttttaaaaattccaaacccctgcaatgtttggattatcttgatgtttgaaacatcaagataagtatcattatgaaactttcattatatgtaatgaatatatgctttggaaagatgacttgtagagctttgtatgaaggaacatggctttaattgtagtttttgggtggcagagacagtctgtgagtttaagattagcctgttgtacatatcaagttgtaggggaacaagagctatacactaaaactctgtttcaaggggaaaaacaaacttggtactgaatctgtgcttatattccttatactgcatcacatagttcccatatttagcataagcttttctggaatgaagttgggcatatagtagtgactaggcatttattgagtgaataatttttttcatcttatatatcattcattatgatactgtcagtagggattaatatgtatgagctttcaaataaatacagttagaatttgcttttactattatatctaggagtcaaaattttttaaactgtcatttctacagaatacttcaaactttgtgccggaaactgagacttccagaaacttttaatttttgtcacttagcacatctgacgcctggctttgttggtgctgatctgatggcactttgccgggaggcagccatgtgtgccgtcaatagagtcttgatgaagcaacaggagcagcagcagagtcctgagatggaaggtttgccccctaaaggagcccaggaggagaggctgggggctgagcccacttctgaaacacaggtgctccccccccccccccccccgggtttctctgtgtaatagttctagccttcctggaactcactttgtagaccaggctggccctcactcacagagatttgtctgcctctgcctcccaagtactggtattaaaggtgtacgctgccattgccttgcatagggcaggttttctaatctgtaaaagtatagtttcacagaaatgctaaaaatacttagatttcttaatttccagttagtaactattttcatgcacagaccagcagatggtataaactttctatcaatggaagatgcattttatcagatttatcacacgttctactaagtagagctgtattttttcatttttattttattttattttatgtgtacgagtgttttacctgcatgtgtatatatgcaggcatgtgtgcctattgtccatggaagtcagagagcgtttctgatgccctgggactggagttacaggtggctgtgaggcacttgtggttctggaatggatcctgggtggtccatgagaatagtgagtactcttaaccactgagccatctccagccctagttctgcattttaaacttactttgtttaatttagcttccatatgaatttagcttaaaacttggggcttattttaatccaggtatgacttgttcgtacctaacaaatacctgtaagtatttattagaaatgcttctgagtggttgatacaccgatgagaaatcaagttcttgttagagtgagactgcgggaaagataaaagagagagcactgtaactgtcagaatctcttgactaataacacatccacaaggtgtggttttgttttgttttaatttcgtgtacaagtgtctgcctgcgtgtatctctgtgcaccacatgcgtgcctggtgtacagggagaccagaagaggacattgcatcccttggaactggagttacagacagttctgagttgcatgtgggtacggggaattgaacttgggtcctggaatagtagccagtgtttagccatctctctagccccagtggttttaatgagagcagtttgctacataatcttacctcccttgataatttgactgagtcaaacacaggttcctttatttatcttagttgctagtattacctagcacaaagcaccccataaatatatcaacatcatagatatgtgtaacgggctagagagatggctcactggtaaagagctcttttagaggatctgggttcaaatcccagaacccatacatatggcaactctcaactgtccataacttcagtccctgaagatccaacaccctcttctggcctcttccggcaccagacataacacgttgtacacacacttatatgtaggcagaacacctatccacatgagttaatcaattaaagaaaatttgacagacagtgtggtacacatgtttaatcccagcccttgggagacagaggcagaggcaggtagatatctattatttccaggccagcctggtctacagatcaagtttcagggttacacagagaaaccctgtctcagggatgggggtgaggataggggcttgtttctgttccttaatgttcttcacaaaagaagaaatttgcagttcaagattcattggacttagctgggcattggtggcgcacacctttaatcccagcactcgggaggcagaggcagtcggatctctgtgagttcgaagccagcctggtctccagaacaagttcccagacaggctccaaagctacacaaagaaaccctgtctcaaaaaaacaaacaaaaaaaaaaagattggacttaggaaagttgcctactgtgtatttgattgataaggtgttatagagccttatatgaatttatattgttgccagagtaacttttcttaagtcagatgctttatgaatatttagaaattaaatgtaattggtaaaaaaaatggttattgaccaactgcctatgtttgcattatctgacccaagtttaagatttagaaacatgtttaatatcaaatcaatctctcttttctctcccctctctgactatgctggcctcaaaacttatatattagctgaggatggctttgagtggcatgtgccactaatattggcctagatattatatttacttatcttgattataatggatttatctctatttaaccaaatacaggatctgcttagaattaaatgagtgtatcttgtgtaaaggagggagaaattatcacaatacatagaaatttattaaattgactataacttagggaatcttgggataattatttaaattacatgtaactttgtgattcatacttttttcatttaactgttatcttaaaggatgacttgcaaaggctcttgaggttgctaagagaccaagatcccctctcagaggaacagatgcaaggactatgcattgagttaaatgacttcattgttgctttagcagaagttcagccttctgctaaaagagaaggctttgtaactgtccctaatgtgacatgggccgatattggtgccctagaagatattagagaagagctcataatggcaatattggtaagtatatcatctgtcagtgtcattgacattggtcatgagttaagagctttaaaaaaaaaaaaccctgtatgcatgtcaaccagattgtactttttaaaacaattttgacttactattttatatgtatgagtgttttgctaggtgtatatgtgtccatgttcatgcctagttctggcggagttcagaaggtatcagagcccccggaactagagttgtagattgttgagaacaaccttttgtgggtgctgggttctctacaagagcagtaagtgctcctacccactgaaccatctctattgcccccaaatccatttctttagaacatagctctactgagatacgatcaaatattataataggaaattcagcctcagttgttaccaacaaagatgtcattctcttgatgtcatgctcactattttggttatgtttggctactgtatagtgagttcaagaaaaacaaattcaggtttgttcaagactaatttgtgtgaaaatcatgttcttatctaggatcaaggcagttttgacagccatgaaattatggactgattttagtttacatttactttcctggtaattgaccattttaattgaattatgatccatttaagaggtttggactaccaaaagtgaaagcgcactagacttgcagagaacaggtgtgtgtgacatgtgactgtgtgcaaggtctgctatgtcctgatttcctggagaaatttcttaaacttgatttaataatatattaaaacagtttatcttagcctagggtaacagctcagtgggtaaagcatgtgccatgcaaaggtaagggcctaagtttgtatccacagaagccatgttatagtgactgtctataataactacaacactcaagagggagactagaagggccaacctgcatggtatacacagtaggaaaaaagagacagtgacccaaggtgaaaggcagggacacacaccagagattgttctttgatctacatacattggcacagatggtaaaatgataaaaactaatgatatttttatctttttacctaatacgttcttacaatttgcatgtatgtataaattccttaagaatagtgactttggcttaatataatagtacacacctttaatccctgttctaataagacagaagtggacgggtctttgagcttgagaccagcttggtctacatatcaagatacagggtaaccaggactacatagtgtgaccttgtttcaagaaagaaaaaaaaaagagagcctttcctatttgtcaccttgtcaccataagggtcagccagtcagtcctattttcaggcctcatgatcaggcttgagtttaagagatgagatacatttgaacattcagtgtgaagtagacacctatcatggatcactgttggcattgtttcttctaggcaccagtacgcaacccagaccagttcagaactcttggtttggtgactcctgctggcatcctactagccggtcctcctggttgtgggaaaactctgctagcaaaggtatggtacaagttcaactgcatgcgttgtgtttcttgttttcagtaggataataaagacttaaataatatcatgaaataaatcctttgtatactttgtttgaaatctaccagtttgaaatcaaccagtttgaaaactggttgttgttgtttttccaataaaattttctattgtttgtccttctttagaacaaaatggttttaattggttgtgccaccctcatttctgggaaagaagttatgaaacatttcgtgaactcaccagtcatttttgtcagggcccattctattgtccaagtattattacataactttagtttgtgactgatcttatttcttgcttttgtttaattttttttttaatttctttatctttattttatgtgaattggcattttgaccatggctgccgggtccccggaactggaatcacagacagttttgagctgccatgtgggtgctggggattaaccctggatccgcggaaagagctatcagtgctcttaaccactaagccatctctccagccccgcttttgtttaattattataacttgagtattttcactatgttctttacagtattaaaacaaacctttctgcaatagaaaataaattaccagaagggggaaaatgtttataatcctacaaccgctgtttcattttgtagtcggttccaggtatttttcttttatacatatcaagatataataaatgcaagacaatttgtttatgagcttttgttgatgttatcaaatgtctaaacaacttaaaggtgaggccacatatttcagtccatggtttctgagatttagtccagtatctggtggctccatgtttctgtgcctttggcgagagagaacatcatggcagaagggtaacaaaggaaagctgcttccctcatggcagctaggagcagagagaggaagactaggaagagactgggaacaagataaatctttccagaatgtgcccctggtggcttacattctcaagcattccactgtctctcagatttctttttcttttaatatcatctgcattgtatgtgtgcctggggcccagagtgctgtaaagcatgtgcacgccacgcacatgcatatgtagacataagtacacataaggaaatttaaaaggtttttaatgcctgtatagtattttgctatagagatgttttgtagttggtgattatggatatggttacacatgccaggaatcccagtacttggggactagaggcatgggatcaggagtttaaggttatcttctgccgcacagtgagtttgaggccagcaaaggcctcatgagaccttgactcaaaaatcccattacattacatactcttgtgttcactggtaattctattagaatgtagtcctaaatcatttttcagtgaatagaacgcatgttttaaagtatatcaaggtggctttctaaaggtttcatcttacagctgaaatttgcagtggccatttaaaatagctgacctggaactcattgtatagaccagactggcttccaactcacagaggtctggcctgcctctctgcctcctgattcctgggattaatggtgtgtgcatgctgccacatctggcttaaaggttctttcagtatttgacaattcaataagtacaaaagggtttttttcctatttgtcttatttgtatctttttttgtttcttctggctaggctgtggcaaatgagtctggactaaattttatatccgtaaaaggccctgaattattaaatatggtaagttgtgtggcagcagccattattttaatttagataaaccttggtaagttggaccttggcgctaggctctctgaatagttgtgccattttgacaacgtctctgttgtagagatggaagattgaggttgctgtaacatggggtttgtaaatgctttcttgaatacgttgtttacttatgaacttgagtttctgcacctttaaaaatggaaatgattattaggtattaacattgaaatatatttgtgctatttatcagacacttcaaatacttttattcttgaacatccttgtaaattatgagttgtttttctctgtgtacagataccatgtgtatggaggccacaggtctaccttgggtggagctgtccaccttgtgttttaaggcaaggtctcttagtggacctggggcttatgagactatactactagcctgtgaaccccaggaatgtgtacctttcttatttagttggttaattctttttaaatttctagggaaggatataatataaatgagccttgaaggaagcagattggtagacaatgaagttgggacaggttgtagctaaatactgaagagccttcacaccaagctagaatttagatgctatgtttaaagcaaaagtaaaatgctttgaagacaagattttaaattagcatgaaaaagttgaggactataagaagttgtggagtgtacacaccgaacggatcattgtcacccagtttggaggaggaacaatacatttgaagctttctgcagaccctccttaaccatgtcctcagtctcttccttaaaatgtgcttcagtctcggcttcggtgtttgttctagtcagatgcctggagtccttttctgccagcatagcagcagtgagaggactaaagatgctcttggtcattggtagcttttgctaccacagctgtcaggtggtaactctagcgccacacttcttatgcaggcctcaggtaccaggaccctcagccctgcaggtggaacataaagaaagctgctgtgtgtgcttaggaagctgggattccttagccctttgcagtagccagtgtttgctgtggcagctgccactgtggacaggtagtcctcttctgcacatgtcagagcagcagtctgtttgtctgggtttgctgcctggcatacttagattcacatctgtcacttaatgaaatttaaatctatccttttggaactttaggctaatttttccctaacttgaattcattttcctgggccattttggtttgctatacccaacattctattgccaatgtggtagttgctttcttccattcctgtcttgacattttatctccctagccatttaaaaatttaaaaatatctgctctggggtcagcaaaatgactcagcaggtaaaatcaactaaggttaaccccaaagatctgagttcagttcctagaacccatatgatggaaggagagaaggaatttccacaagttgtcagacttgcatatgcatgctgtggcatgctgcctcccttaccatacagaaaataaataagtgagaaaatgaaatatctacagaattgtagagtgagtttgtgttgtatgtattggggtggtgcacaggtgtgtgggtacacagatgtatagtgatcgtctcgccagcaagaatgacacaggacactcagatccttctgcagtaaagctttaatgcatcttgagagggagagcataagcttacagagcggagaccccgaactcccaaaaacccatcccttatataggctggcaaccgccgccgcctccgacgcgtcgccccctgactggctgtagctcatcggaccatatgacgccacgggagaggcagagaccaagggatggaaagttacccagcgcctgcgcactaacttgtttaccattcggtgcctgccagatgcaggcgccatcttgtaatggagaatgcagggacggctccctacagtataggtgtgtggagaggccagaaatataccttggatgttgttcttcaggttctgtctaccttgttttattgagacagggtttctgagtggactggaacttgccagttggtccagattggctgaacagcaaaccccaaggattctcctgtgttgggattatgtaaattctagccaccacgctgatcttttcatgtgggtcctcagatcctcacacttgcacagcaagctttgtgtctccccaacccagacctgctcttactttgtgttcgttatgaagactccttttcttttttacaatgatgtatgggtcttgtgcatgctggcaaatgcggtactacttgagctatactcttagctctctcagaaaagttcttatgtctggtaaacagcaaatccttttccttatatgtgaattgtcttattactcagtgctacttatggattgctatgtttccttgactgaacttaatgtttctatttaaatttagattttaacgtggactaagccattgtgaatttatgagatgccaagtgcattcactctgactccactgttgctatataaaactttttcttattttagtaagaatatttgtttatatatgggagtagacattgatttgatttgtgtgttttcaaaatactgttggataagtaacaattactcctgtatattttactgtataagaaataggaaattggttttagactgcaatagaattatgggatttcttttttaactagagattttatatataaagttgtaattggctgtccgttttgtttgtttggtttgttgtgttttttgagacagggtttctctctgtttagtagcactgactatcctggaactcactttgtagactatgctgatcttgaagtcacagagatccacctgcctctgcctcctgagtgctggccttaaaggtgtgggccaccactgccccacagctgtctttaagggaaggctttgctgtgtagtccaggctgatttgaaactgatggtccccctgtctcactctccgaaatactgagattagaggggtatgccagcatatacaggacaactgcctgtttttataaaatatcaaaaggatttaatactagcaattgcatatggtttaatctagtactttttagaactcttgacatgtatatggcttcaagtactttttaaaatactttttaaattaaaatatagtcacatttgatcccttccctttcttctatccaaccactcctgtgtgcctctccctctgctctttctcttaaattcatagcctctttttctttaattgttgtttaatattcctaaatgtataaatacataaggtctacatgacagaaagctactattgctgtcatttgatactcagcccactattaaaccgtctctcaattttttatctactttgtgttcgtgtttagtatgttggagaaagtgaacgtgctgtgcgacaggtttttcaacgggccaagaactcagcaccctgtgtgatattttttgatgaagtagatgctttatgtcctcggagatcagaccgagaagtaagtatcgaagggtttttatataaaaattcatataagtcacatttgtggaaattcctttcagctgattactcttctgacaagttgctggtgatagcattgcatgctccatgtgtcagtattttccctgtggtatactattccacaatctagccacagcaggatatacttgacaatgtcttgcttccagcaatttcttctaggggtctcctttacaaacagaactttctcagacatttgtatctgctatgtttgtgcacatatacaaataatgtgggctagaatttgggaagtatgaatcatggctgaagatgtatatatattagacttagatattgattgaatagagtaagtactatggcatatttcagagaatctgtcaattatataataaccaagaacaatgtgttaaattgaccattttctacaccttttcaacctaagagtaggctgaacccccctcccttttttttggtcagttttattaacaaaacatattttgtgtatatggtcttcatttctggaaagattgaccattttcagtaaatttgtcttttgtcatcagtaacttacttgataatatcagatacacttgaactttcttactcctgaaatgtttctctcttttttttaataatttatttaacttcattttatgtgcattggtgtgaaggtatgagatctcatggaactggagttgtagacagttgtgagctgtcatgtgggtgctgggaattgaactcgggtcctctggaaaagcagtcagtgctgagccttctgtccagcccccctgaattgttacttgattagagctctttatatggagtgaaaattggtcccttttctatctagttcagcctaacatctgttctctggtcttattacttatcctttttttgttatagagtgtaataattttagcttattattacagtctatcagcctttattgattctgtagtttttctcttggttaaggaggataatttttaattttgttttagaatggatgtgtacatgtatgtgatgcatgtatgtgatgtttgctgcttgtgtccaggtgtgcattcacagagaccagaggagggtgtcaggtgtcccgctccaccactctgacttactccctttgagacatggtcccttactgctcctggagctaggttggtggttagcaagccccagtgagctcctaacctgcgtcctctaccaggcctccacactctgctttttatgtgggttctgggatccgaattcaggttctcaaatgtgtgtggcaaatgagtcatctcgacagcctcacagtctctctccccaccctcctctctcttcttcttttcaatacagggtttctttgtgtagccctggctgtcccgtaactgactgtgtgtagcaagtctctctttgtattgcaaactcccgaataatgacatggagactaattcattaattatgaaagcttgaccttagcttagacttggcccactagctcttataacttgaattaaccctttattttactctacattctgtctcgtggctcattgcctcatctctctgtactgcccatgctgcttcctctgtatctggctggaaccctgcctgttttcttctctgcgtcctctctgtccccagaagccctgcctaacctcttcctgcctagccattggccgtccagctctttattaaaccaatcacagtgacacatcttcacacagtgtaaaggggtattctacaacatctttgtatatcaggctggcctcaaactcacagagatacatcttcctcggcctctcgagtgttaggattaaaggcgtgaacccaccaccacctggctaaaatctagtaattcttgatgttattgagtctagattatgagtctattaatgtcttaattattagtacagtatcaccagaaagtaatatgtctccacaaatgcatccttctaaaagaatcagtgggtttaagctcattgctgtgtctatacgtaaatttatgttgaagaaaggcaattaataataaaagatctatagcattactttctcatttccttcattgtttatgtattgttggcatgtttccacatctctggaaccctatacttctatttctagatttaggtgaccctctgccttagcctctgagtccctgggacttctgggttcttgctactgttcagtcactgtgtctttcttcagcagaagctctcattcaagttagtcaatgaaaatggaggaaggaggctgctttctttatgttgaaggtgatggaaccagacttttgttttttgttttttgtagacaggtgctagtgtccgtgtggtgaatcagctgctgacggagatggatgggttggaaacacgtcagcaagtttttattttggctgccactaataggccaggtaagaaagaagaacattacacaactgagttcataaagtgaaatatagcttagagagctcttgtgaatgttgcagtaaaaaacattggggctggagaggtggctccacagtttagaacactcacccacagggcagcacacagctgtgtgtaactccgttcccaggggctctactgcaagcatgtgatacacagacatatttgcaggcaaaacactatacagataagatcttaattaattaataaataaataattaataaatctctttaaatgtaaagaaaaacattattttctgcttctcctgaaattgtttttttctctattgaattttgtgctggttgtttttgttgtctctccttgacacaatctagagtcacctgggaagagggaacttcatttgactaattagttgctcagatgagattagtccttggccatctctgtaagagattatgttgcgtattaattgacatgagtggcaacctccctaggcaggtggataaaggctgcagaagaaagctagccctagagagacagatgattcagaggttaaaggcacttgagctcttgctgaagacttgggtttagttccctgcacctgctcacaaccagttctgggggatcctgtgctctttcttggtctctgggcaccagagacacacagtgcacatctgtacatgtaggcaaacccctgaggaaacatgtaaaaataaataaatctttagagcaagggaaggttgattgagtatgagccagtaagcaagcaagcccttagcagtattaactgtaaatccaataaatattttccccttagtagcttttggtcattttttagtcttgatgcttatcacagtgatagaaggtaaactagaacaattctaattaataaagttgtccatgtcagcaaatacttccactatatttttttgtttctggtttgttaatttgttttttgagacagaatattgctatgtaggttggccttgagccatctgtcttcctaccttggtttcctgagtgctgagattataggcctggaccaccatgcctggcatagtgcacactcttaaccctaaagtcgtctcagaatcggtgtgctgaaggcatgcctcattattggcttgcacctatgatttaaaaatggttttcaagcttaagcattctgttagatttaaaaaaaaaagtctaaaaacttccaaggtgcctttctgttttactgtaatttctgttcatatttttaaccctttgccctccctgcaatccagactttcatagatggtcagtctcctgtgatgttttgataactgtctgctagccaggacactgtcgaattctctagagctagaggtactgggcacttgtaagccacctgccattgctattgggatccaaactcaggtgctgatcgaagagcatctggtgctgttaaccattgagtcatctccccggccccatcctgtgtgtgagcagattttggttttggtttgttttctttttttgagatggggtctcacagaatagccctggaaggccctgcctcagcctctgtaagtactgtgatgacagatacagactctttacttggccctttgaatggatttctcagttgtctaagtgacgtaaagttttcatttggattaagttactatagaaacccaacctatgatgtacccaccatttcattttataatgaaaaatgtaaagttatggtttatagtttcactttgttaaaaaataaaatgtgatcatgacagacctgggcttgagtactcgttgtaggacaccccttgggggagggggtgggaagacacaacaccaactactcaggcactgggaatcagggagtagccaagcgtgctgcagactcgtttattaaggaagttagagctgcctttatacctcctcccaaggtcccattggctcagggggctgactctgttacattgtcctttcctcattggtgtctctgggcatagaggcaggcttggctcagagaggaagtgcctgcctcaaatgctcatgtaggctggcctgcttaggtaggctggccgcagtttctcctacaacatggtacctagtatagaatttcactaactgggagctttccttaaacttcaggggccagaatttttattgggacttcattatggacactgtcttagtgttctattgctttgaagagtcattatgactatggcaaggcttaccaaagaaagggttgctgatagtttcagaggtccattgtcatcacaggcagacatggtgttgaagaggtagctgaaagttctccatcaggatccacagctaggaggaagagagagactctgggctgggctttttgaaatctcacagcccaccccacttccttcaacaagaccacacccacttcagcaatagtgccactccctaagcattcaaaccaccacagagacagagtggtgtcttttttccccagaattcagagagggtgtggctcaaaatttgaacactgatttcattcctggtcggtgttatgactgatcctcatcctaacagtatctagagactcatcattagtatagcaaagacacttgtcacaggagcaaagcctatgtatattctttgtgatggttttgccttgttttgttgtttgagacagtctttttatgtagcctgccctggcctcctaagtgacgacagggtggcagttgtgtaccaccatttccagtgtgtgtgtgtgtgtgtgtgtgtgtgtgtgtgtgtgtgtgtgtgtgtagtaataccatatattactacatcttagtgactgtcaggtgacaataccttcttggcagggttgtcttatagtctgagtggtgttgataatgttaacaggacatgagcaattacaatactagtattgggaattgtagggtttctgttgctgtgaagagacaactcctttgaaggaaaatgtaattggggctggcttacagcttcagaatttagtccattatcatcagggtactagtcatggcagcacgtgggcagacacgctgctggagaaggagctgagagtcctacatctagatctgcagatagcacagggagagagtgtgctgcactggctgtgactggggtgtataggagacctcaaagcccgccccagagtgacgtcacactttttataataaggtcacacctattcactccaaagaggccacaactttcggtcacctagtctatgggggccatacctattcaaaccaccacaagaataattattggtcataagatttatagagtctttcaagacaaaaccttgaaagtcctttagatttaaatatgatcctacattacctttcttgagcatatatatttttttcccaacagattgtctgccaggcttctgtagcagcatcttctgtccttactgggctatatgccattgttcatatttatgtgctgaaagcaattttggcttttatttatttcagtagactagagaataataggccaatcggtatagatggatttttctttttgggtcaccagctcacaaaaaaatgatagaggcataattgttaattatgaaacattataaatttataaattataaaattttaaaaaattataaatttattaagacagggtttctctatgtaagagctctggcagtcctggaactcactacatagaccaggctgacctcaaactcacagagatccaagtacctctgccttccaggtgctggctgggattaaaggcatgcctcactgctccccactaagtgcccacatttttgtgttttttatgtgggttaagtttttgcctgcatgtatgcatgtccactgtgaaatttaaatgacagcagatttatatcaaaaaataataaaggctagcaagaagtgttataatacttttcaagaggtgaaaaaactgtcaattcagagctttgtatccaacaaacatgtatttcagaatacattcttaggtaaagaactaagaaaatctgccatgagccaagatactccagaagaatagctaaaggaaggactgggggtgtaatttgcttagtaatagagcttagcgtgcaagcccttagcttgccctgtactggggaaaaacttaatagttaaaagaatgaaatgtaagtgaatgcagtagagttttccttgtgtggttttttttggcagggggtgggggggtatttagatttgcttgcataaacactggtcttaaccattgatacttcttacactccctgtcttggtgtgttgaaaaagttttgtttacaaatgggttcttggtggggaagtcaggaaattttatagtaagcctcagggttgtggcagtatgaagctcagcactgtgccatagctactaagagccaggaacagaaagaaacataagatagttggattatttggtaagtagtagtctttgattgtggggggtatgaaatctgtgtgtgggtgtgggtgtacacgaatgggtgtggacaacatagggtgtcttcctcagtgttcaccttgttttttgagataggatttctcaccaaaccaggaactcgatatggcttgattggctaaccagcaagcaccaggatcctcttatctctcccttcccagtgctgatgttaacggcagtgctgccatcctttgatttttatgtgagttctggggatttgaacttaggttctaattcttgcattgtaaactcttaaccaattaagcactgtcccagtcccagagcgtttgacttttaacaatacccaattgcccacatttttcagctttcagctttttttcaaaaggaactctggctttcactaactacataaaaaaaaaaaaaaaaaaaaaacaactgtcgtatttaatttatttctccttttgtctcttctccagatatcattgaccctgccattctgcgcccaggccgcctggacaaaacactctttgtaggtttgccacccccagcagaccgtgttgccatattaaagactatcacaaaagtgagtaaacgaaattattttttgttatgtttatatcacttaaaatgtatttggtttatgtatatgaatgtctgcatgaatttatgtgcactacatgtaagcagttgcccagtaatgtcagaaggaggaatcaaatttttgggactggggtgaaccatctctctagccctgcccatatcacttttaaagttataccagatagtaatttagggttggctgatgactctgtatagcttaactgtttaacaggcctccatctcccaaagtgggctggctttgatcactaaatacattgtccattctcatttttcctactcaaaatgaaggtaaactaaatgaaggattagagttaatgttcaaccagccttagcagatattattgcaatcatgttccccgtgtctttaaatctttgatcatcagttcctgtctgaatggagtaagaaataaagcaagtaaatacaggtccatcggaaacattcagtgtcgaggttgggttttgggtgagggattaaaaagcaacatcttaatgccaggcagtggtgtcacacgcctgcaatcctagcactcgggaggcagaggcaggtggatctctgtgagttcaaggccagcctggtctacaaaggtacacagagaaaccctgtctcggggggggggggggggggtaaggcaacgtcttgggtactgtgtagagcaggctcctttcattctcaacaagttggtttcagtgttattctccttctagtcggtctcataacataaattccttacggcttctgacatgccagtctgcctcttatcctaactctccggactgaactctgtggctcgcgctctgcgttgattttggagttggttctaatcccttagtcataggcctttcttcttcataagaaccagtgacgtggatgcatgtgaatcatgaatgcctcaaacaaagctcacatttctctcttctcagaatggcaccaagccgccgctgggtgaagatgtaaatttggaagcaattgccaatgaccttcgttgtaattgctatacgtgagtattgaagtctctggtctcttcaccctctggagtatagcttcttcatcaacaggagagaaaaagatgcccatttctcaggttgttggaaaagctaatgaggttttctgtgtaacaccttacctaatgcctggtggttcttgctgcctcctcagaggacagcttgcttgcccatttggatgttgaattcctgacgtagacgatgctattggcactcaagcttgcctgaccacttggtcgcccttcactattagttctacttgcagcatatgtaaagccttgctcctcgctggaggttaatctgccaggctgtgctccctgctcacatgtacattgagcctgcaacagcagcctgatgactgatacttctgccttcagcttttgtgtattcttgttatggattagctgagaccctccctccagccactctgttattttaaagccctgttgtttgtccctaacacctttggtagttgatatttgcctctagagcacggccagctaacactggacttgccaccagtagtaaggtaagtgagtcagtatttcattgttgagggcttcagggctgttgctcagcagagcaaacttacttccaagggtttctgtgtggctttggagttctagaactcgctctgtagaccaggctggcctcaaactcagagatccgcctgtctctgcctcccgagtgccgggattaaagacgtgcgccaccaccgccactatcaccactagggtcaagagttggtcttgaatggtaacatagacacttgattattgaatacctggaaatgaggttttagttctaaaattcatatcctttcttaaaaattctttgtggattgtgttaaagctaagtataggaagtcccagtcaaacactggtgcttcactgacttcttaggactatgctgacccagcctgttattgccttgaatatttattacttgtaataattgcacaatgaaactttggggggcgtgtcttgtgtctgttcactcagctttgtatatgtgtgtgcaagcacactcgtgcacttatgtccacgttcatccaggtgtgtgcaggtgcctgtggagatcagagtacaaactactttaggtacttaggtgttgttcctcagaagccaccttgtattttgagacaggatgggttttggttttggtcttgttattgttttaaatcctagagctcatgcctattagactaggctgagtcaccagtgaactccagggagctgcctgggctttgactgggcttctttttcttttctttttcctttcctttcttattctttttttttttttttaaatgtagtttccaggaattgaattcctgtcattgtaccctagcctctgggtggatattttatatctacattagtatctacggctaataggaaggacatttttagttttcattgtatcatgccttccacaaatccttctgttctggaggttaaaagctctctcctactgatcccagtcagcttgccccaccttcattcattgccctttcgtcattaagtatattataattgaacgtctctcttggcttttagaattcctaagaatacataagagcacttcgttttttacaggggagcagacctctctgctttggtacgagaagcttctctctgtgccctgagacaagaaatgacaggacagaagaccacagttggagcaggtatgaggccctctgggatctctccactctagtgtaccattctggatattataagccctgctgccctttaaagagattgttttctagcatttttaagacaatgtgtaataaaggtgactgttttgatgagacctttagaaactgttgtggaatattatgtaaattcttgttgacacaatattcgttagtatctttgtttttggtgtttggtttttggttttttgagacagggtttctctgtggcattggaggctgtcctggaactagctcttgtagaccaggctggtctcgaacttacagagatccacctgcctctgcctcctgggattaaaggcgtgcgccaccaccgcccggcttcgttagtatctttgtaataagcagcattgtattttgtcagtatacacagtaactagatagaaacagatgtgtttcttcactgccattatcatgagtttgctacttaacaatttggaaaatcataattcttttgctaaaaataaaatccacttacctgttgaaattcaacctaaattggaaagattaagaaacataattttccatatatcaagattttcctttcaaatataaaatcagatggcaacttttgtcactcggtgatggagatttttcttagcatgtgcaaggctcaggattctttccccaacattacaaaagccagaaagtccaaagacaaaacccatgtattcctttatggaagcgtgtttgttgtttacttcacatgcagtagtatttttggtgttacttttagggtatgtgtgtccagaaaagattcacttttggctgtattctagctatgccaagtacagaagtagcccttactgtgtctgcggagctttgtgctgtacaggatgtagtctcactggaccttcaagtgtgtgctggtccccattacaaccctgtccaatccagtttagtgacatgcatttgtatcctccacgtttgtgtctttgagagcttgtagcctttgttactcagtagagtgagtttgtattccagagcacacttgatagcaatacaggttcctggttatttctagttcgcttggctatcgcttcttatactctcttattattcgacctgtgtgagcagcatacacagcttagcttcagctatttttcttccatcccaacattcctgagagacagaatgactcccaacagtcctgtttccccaaatgaataaatggagagactctcagtaaggcaaggctggagacaggtgtgttaaatgcacttggataggttccatctgatcacccatatcaattttcctgtctttcaagttcccggactatactgaggtgtgtgtttatgcatttcctccacaggtgagctcaaagtcagccataagcattttgaagaagctttcagaaaagtaaaaccgtctatatcagcaaaggtgagaaacattcctcagtgtctggaaattacatccatggataggaactcagaaatgttattagtttattttatttatttttttattgagggatactatctttatatatcctaagctagcctgaaactcgggagcctcttgcttctgccttccaagtgacaggattacagacatgtgcctcttcactggcacacatagtaataataggtcaaaactttgggtgttcatatcatgaaatggtatagctacttggaagaccacaaaccatctccaaatttattactgaatagaaaacataggaattgtgtctgtaatatgctatgtatgtgaatgtgtctgtgctatttctgttaaagggtgaaataactaattgtagtttgcttgcattccagaaggaaaatgtatatggaaacattgtttataggaaggagagggagagagaaattctttttccctctctgaaagtttctttttttgttgttgttgttgttgttgttgttgttgttgttttccaagacagggtttctctgtggctttggaggctgtcctggaactagctcttgtagaccaggctggcctcgaactcacagagatccgcctgcctctgcctcccgagtgctgggattaaaggcgtgcgccaccaccacccggctctaaagttttatatattttgtctttcacatttattttgtgtgtgtgcatctgccaatatactcatgcctgccacgtggggcctagggactatactcaggtcaccaggcttggcagcaactgccgtcatccattgaatcatcttcttggcctaagtattatgtatttttaacacttaatgaccattttacctatccaaagaaaattttaattcagttagcttgctttgtttattcagggttttgatgttgtttgtttaggttttgtgtgtgtgtgtgtcttttgattttcttgtttgtttgttttgttatttgagacagcccaggctgatcttgaactttctgtctagctgaggatagctttgaatttctgaatctcccgtctctacctcacagtgatgacagtatagacagatgccatggtgtataccaggcattcaatatgccaaaccagctacattctcagtctgtctttgtcttttgagacggggtttcactccaggctgtcttgaattcatgatgatcctctgtcgagactccctgagtgttgagattgtaaggcatgagccatcacacctagctagcatgattggctttttaaaatagatttctcttttattttttacatttatggggttgggggggggggacgtagctgaaccacagcatgaagcaaaaatgagagtatgacttaaaagttctctcttcctttcatgtggagtctaaggattgaactcaggttgttggagctggtggtaaatgctttcatcgtctcaaccatcttgctggctctaggatagattctaaatagctggaaataaataaaccagaacacattttaagtttttctctgggataaatagtgggagcagcattgtcatctaacactgaaagtcaatatggcaacagtgagcttccactccatacctgccggattgacagaactttgaaagattggccacagcgagggaggcgagggcgtgagattcaagaagtcccgtatattgtactggaagcagtggcgcagtcacattgggagcaattctggcagttttttgggatgttaagacactttagaaccccctacttttgttttctgtttccatctggattcaggatggtttacagatgcagacatctcttgacctggtttgcaaacttccctggacatggatggaaaccatggtgtatctctagagatgcaggaaggagcaaggcagagttgctgggaccagctgccagggccactgtgactaagggccatagacaggcatcttaacagtagagattgtatttcctcactgttctggaccagactttgttagagttctaaggtttctgtccccacagccttcacatgtccttccgtttgtgcattctgttgggactgaggccaccttcactgttttattttaaccttgtcacctttgtggaagccctgtataaccacactttgaggtcctaggagttagggcttcagtataggagcttgccagttacaactcccatcccataacttagtgatgagcactatgtggtattttctatcctaggatcaaatgatgtatgaggctctgcagcgctccctcagtcagtgacgcctgcagtgcctggcagggaggtgtcttccacatggagcccaccaagaatcacacttgctctgaaggacttactttcagccggatgcagatgacctcattgtaagcattttattttcaaattattgaggcccaactggagaagatgatgtctcctatctggccagctttgtaggaaaactccgtatctcctctttaaggaatagaagaggaagaaaaaaaggactgataaagcaaagccttattcaaataaaattttattttgaactgtcttgatcatacatacagttacaaaaaactgtttccctgagaagtggtcacctttaatcacagcactcaggagggagaggcaggtggatctctgtcagttcgaggccagcctggtctccaaagctacacagagaaaccctgtcttgaaaaaaccaaaaaagaagaagaagaagaagaagaagaagaatgacattgatggggctggagttagcaattaagactacacactgctctttcagaggaccaggtttgatttccagctcccacataggcagctctcaactgcctgaacttccggctccaggggatcctggaggacctgtggcttctataggcacctgctttcacatgcatgttcactcccaccccacacacatacatactttgtaaaaaataaaatgtatttttataaaaacagtgaaattgataatgggttggcaagatggtccggcaggtaaaggtacttgctaccaagccccacaaccttattttgaaactggagacccatatggtggaaagaactaactcctaagagttatactttggtctctgtatgtatgtctctctctctctctctctctctctctctctctctctctctctctctctcacacacacacacacacacacacacacacacataaataataaattggagagaatatgactgaagtaaaatgaaggttacaaaggtcaacaagattccctattcttgaggacttaagagaagtttataggtactaaagaaaatgaccctgtcaatgaaggacataaaggagaacagtattggattcctgaagaccaacaggctaggaaaacaaaccaggatcagtggaggcagatggctgaggaggtcaagaaattagaagtaagcgccagaaagccttaaatagtagatctgagcagttgagtctggtgctatacttgctacacgccaaatgaaaacaccacctggcatatcagagatcttcctgacaactgaatggtggggctaagtacattctatttctggtactctgaacataaaatatagattgtataagaggtgacggtcatggtacaagttggacagcagtcagttcctgggcagaaaatagattccaacatttctgcaaatgataactttgaacatgttctggaattgcttgacactcttgtgtgctcttatgtggtgttctcaactcaataggatgtgttgacatcctatctttttacattctacattttataaaaataaagattggggaaaaaatgaagattgagattttgctaatactaacagcctagcctctagtctggttatctaacgtttctctggtgaaaaagatctgtcctgtttggaaacatctggaatttcatgtactgtcccctcattgtcaaagagttagctatcttaaatacatcttatagccaagtgtggtagcatatgcctttaatctcagcacttggcatgtagatggatggatctctctgttccaaacaagcagaggctgtcatgagactgtcttaaaacaaacagtacattttgtgtcagacactgctgacatgatgaaggcgcaccctcacaagaacttgtttgttccttgatacccattctaatttatttccccttttattaagaagagcggagagctgggcagtggtggtgcacaccttttattccagcacttgggaggcagaggcaagtggaactttgtgagttcaaggccagcctagtctacagggcgagttccaggaccgccagggatacacagagaactctgtctcaaaaaaaaaaaaaaaaaaaaaaagcctagaaacctagccaactccctggggctagtgaagtcatggatcttagaagagcgcatactaccacctcatgaaccagcataattcccaactgcattctaaaacttgtactcacagataagtgcagcgctcaccccacatccaagaaacttctctttgcagcaagcagagttacagaagttcacaactggccacagtgcaaagatcaacttactgtggggttcccagccccaacagatacatctacaccacaactcctggacctaagacttagggaatataaaggaagagggagtgaaaagactgttaagagccaggatatcaggaagtctgctgtgagattgtgtcctagacatgacagggaagcctcacttatgttacctcaacaatatggctgccttataagaccttaacaatgacaatagacattctagtgcaaaggggtgaaatctcctggagttccatcccttgacaaataaagaacaatagtcaactaatgactgcggagagagagaattagtctctcataggggtgagcccccgtcaattggtaatccaataaaaattgatcagccctgaaacattaaactgacttaacagggtgtgtgtgtgtgtgtgtgtgtgtgtgtgtgtgtgtgtgtgtgtgtgtgtaacaagaaaaggcaattccagagggattggaggggtgttgtttgaccgaggaaaggggaggtgatataattgttaaacctgacgatgatgtcattgtagtttttgcctttatagatgctgcatcctgtgtgaggtggtgggaattcaagtcacaagtctcccccacgcccagacgggtttctctgtgcagccctggctgtcctggtacttactctgtaggccagggtggcctagaactctgaaatactcacctgtttgtgcctcctgggtgctgggattaaaggtgtgtgccactaccatccatccctaactagttcctataacttaaattagtcgatatttttaaatatacattcttccacacgctcatctccatactgccagtcctgcttccttcgtgtctggctggtaactcttccttctttccagagttttctctatgcgtggaagtcccgcctgtactcctgtctagctattggtcatttggctttttgttacaccaatcacaacagtacatcttcacacaaatatcccataacataaaacagtcacctgaggttggtgacaagcattgaagtgtctgcaaagaaagaagaaaagctttgggaagccgaacagcaggagaggaagttcattccagatgaggagagcagagaggaccactgtgaagggcaaggagaagccttggaaaagaaaagtactttctgcatcaggaattaagagaatgaggggaatggagaggggtggagaacaaacaagccactcctccaaggctcataacagattcagaacgcacaatacagggctcctcactaagcaggtctgcagtctaactgggcagatatcctggagtctataaaacacagctggtgactggcataatgatttgtgcctataatccttacacttgtgtttaagggtagcctgctgtacacattgagtgttacctcagactcgggggccatgtctaggaaactaaacaagttgacaaacaaaaactaaacaaatctacaaacaaaacaatatatttctgtttggaaaaatcccatgcattggaccagcacgctgcaggaagccactttgaaaaaatccatgcagaatgcagctttcagttctacagattgcctccttgtggagcttgctcacttgggaaactcagagtaagtgccaggtgataatataccaagagctggcctgagagtccctagaagtgtggatcagcacctcggagagctccacactttagacctgtccgagccataggctggagtggagtccatgtccccgtcttggagctaaatagagaagctagctaccagagctcccgtgtaggaaaaagaaaactcagcaatagaagatcagagagtgaagtgtgggagctgctgtgccctgccacaaccagagaatcttgaaggttcgatgccccattgtgtgaaatgtctgacagttctcaaggtccctggaaccagaaagagcacccagagtgatagcaggcactgctggctcactttcaggaaacaaatgcagtgatcttcccagaaatccaaataccataaagggctgttctcatcagaggacacaaactcaaaatagcccctgagcatcagcctctctccaggttcctgctctatttgagttcctgtcccaacttcctttggtggtgagcagtgttgtggaagtgtaagccaaataaaccctttccttcccaacttgcctctggtcatggtgttgcattgtaacagtaggaaccccaagacatacagagactgattaagtcaaagattaaatcagagcaattgaaacgtatgcatttgttgttttattatgtgttatccccgttctctcttcccctttttaacttggcatctatgtttgtagaccatttttgtcctttctcatattcttcatcccctctctcatctatcagtataggacatggattgataaaacaaactcaataaggtagaaaggaataataaaaatttaaaaatcagtgaaatggaaatgaaaagaataagataatcagtgaaacagggttgatttattgaaaaggtaatcaacactgacaagctcttaaccaaacaaaagacaacaaaatcaagaaagcaaaagaaaagacattactttacaagagatatcacccattaaacccagaggatcaataaagaataccttaagatcatgtattcaaatatatggggaaatcaagaaatggataaatgtgtagaaatatatggcctgtcaaaaataaaccaagtgtttttaaacagctgaagcaaattataatgagcaataaaagtgaagcagtaataaaaagactccccaaataaaactacccaagcctcagtgaagtcacttctaaattctaccagaccttttgagaagaactagtactattcttcaaattattccacagtaaggaaagaaatacaaccaaactcactctttgaagctagtattactctaacaccaaagctggcaagtacaggcagaaagttatatgtgtttgaggccagcctggtttacaaagtgaactccaggtcatccagagctacagagtaaaaccctgtccaaaaaccacaaaacagaaacaaaaaataacaaaacatctcaataaaatgcctgcaaactgaagccaacaatacagtaaagcaattattcactatgatcaagttggtttcatttcagggatgcaaggatggttcaacatgcaaattaaaaatgaaatatacaacattagaaaatagagaaagccttatagttacctaaatagatgcagagaaggcctttaacaaagacgatcatgcccttcatgattagaaactgaatttagaagtatctcagcacggggctggagagaaggctcagtgattaagagcactgcttgttcttcccaaggtcctgagttcaattcccagcaaccacatggtggctcacaaccatctgtaatgagatctggtactgtcctctggcctgcaggcaacatgcagacagaacactgtacacataataaataaatcttaaaaaaaaaaagtacctcaacgcattagttggtaaatctatagtcaaaaataaacaaggggaaaacaaaaaaggaattttctctaaaatcaggaatgagacattcctggtgtctcctctcttcactgttatttaataaaatgttagaactcttaactaatgtaaaaagtaaaaatggaactgaaattactagaggaaaacataggcaaaacacttcaagatctaggcatagtgagttctttctgaaaaggactcaaatagctcaaaaaataataagcatgagttgacagatggggttgcatgaactttaaaagtttatacacagcaaaggagacacctgagtgaaggggcagcctatagaattggggggcgggaatcaactgtatctgacaggaggtatcgtctagagtagttaacttcaattttaaatatcaagatattcccacaaagaatcagccgattaatggactaatgaaatgaataaacagttctcaaaagatgaattacatttgttaatttcaggacattcaaaagatgaattacaaatggctgaaaatcatgaattaaggctcaacacgctcagacatcaggaaattgtaaatcaagactacattgatgttccatctcaccccagtcagaatgtcaaggaaacaacaagggctggagagatggctcagggggaagataatttgttgctcttacagaggtagtagttcagtttccaatacccacaccgggtgggtcacaaccccctgtaagtccagctccacagaatctgcgcctctcttctggcctccatgggcacccacacgtgtgtatgtaatataaattagtgcagcagtgggggttttaaaaagacaactaaatgtagaacagcagtttctagctatacagttagctagaaattgtacaatacatttatgtttaagcctagaacaaaataccgctcctgggaatatatccaaaagactctaagtcaatctaccacaaatatttgcttttgttttgttttttcatttatttaaggtactggcattaaaactatggacttgaggatgtttggcaagtgctccaccattgagcactattgctagcctcaagaacccctggttttttgttgctgttgttttcttttgttttgttttgtccagaacacctttgagatccttctgcagcacaggaaatcttgaacatgagatcatcccatctcaggtgatgaacaacttggataataggcttgatccatgaagaccagcttgcaggtgctcatcgaacaagtgaggtctatatgcagggagctaggtcactggagattgtgaaaggggacagtgtgaagagacagagtttctgtcccacctggtcctacaacagtttagccccaaataaacacacggaggcttgtattaattataaactgtttggctgatggcccaggcttcttattccctagctttcacttatttattaacccatttctattaaactatgtattgccacgaggctgtggcttcccccataatgctccagcatgtcactcctttggtggctacatggcatcaccctggagactcactctctgtgttcctcttcccagtattcctagtctggtgccgcgcccataccctgcccggctaatggtcaattggcattaattcaccaaccaataaaagaaatgtatattcacagaatacagaaggacatcctctccttttatacctaagtgacaaggtgtctattacagtaccaaagccactgagttgccagtagcagaaagcaacggggagagccactcataggctggaaccctctacagctctgtccagatccagcatgtcctcttttcacgttgattctcctcgggtgttattacggttggatttgttataattccattactgggtgaggccctattgcccactatgaggggcatatgtgaggaggtgagagccccaagtcacaaatcagccccctgggactagaactagggacatgtatgtgacaaagaagtggagtggtgcctgatattccattcctggtgagtctgagactggagggtcccccgttccaggccagcctgatctagggagtgaggctttgttggaaaaaacaaaaagaattataaagaaaaaaaaagaattataaaaacagaagcagatagtctggatttgggaaatgactggaaggaggagctttactagataatggctgagttggctttcagatgtggagatttttctcggagactcagaactcagccaggtaagacacctccttgaggagtggggtggtttcaaacagcttgagctccttggaggtcactggaaacaaagttatctgctgatccacaggcagaggctttgactgtagcagaggtgccaggagttcctgcttagcagtgtaactgctagaattggtagcaaaacaagtaactaaacacagtgaagccagaaggatttccatgctttcccagtctgagaactgcaaagccagctgccaaccagagtaaccaatattcctcgctgctcatcagtctttcccatctcagtggtgctctactggagtcaccgagctgtactggaatggctcagaagggctgtccagagaggtgcaagtgaacctcggatgagactgacgggcgcccttgtttttcagctatagcaaggctgggggcggtgacacagctgaagcaagtcacaacaggaatgcccgttcagggattcctgcctaaagctatttcatttcctggaatatggttgtgcacatgaggcaagtgactaggagaaacgggacaggaaacactttccacctactgatggagaataatcacctcaacccgtccaaccagagaaaacagtaacagcaaatgctcctgtttggccggcctttcaccagtgtgtttatagttgactttgatgcctttctgtgactacctgtagcaacggaaggatgaagagttctaacagatggctcttcggtacctgcgtgagccagtctgtgcctggctcctcacacttcctcctttcttgagctaactcaagccagggcatagcacagtaagaacacagaaggcctctctctgcattcatgtcttgctgggtactacttaaatcttatccccttttaaaagaactctttttcggatttattttttttttaattttatttattgtgtatagtgttctgtctgcatgtatcccttcaagccaaaagagggcaccagatctcattacagatgtttgtgtgccaccatgtggttgctgggaattgaactcaggacctctggaagaacagccagtgctcttaatctctgagccaacctccagacctcagatttatttttatgtgcatgagtgttttacctgcctgtgtgtctatacaccacatgtatgcagtgcttgcagaggctagaagaggtcgttgaatccctggagctggtgttacagatgactgtgagccaccatgtgggtgctgggaattgaacccaggtcctctggaaaagcagtcagtactttcaaccacctagtcatctcttcaaccccaaatgttacaccgtttaatttttgtttgtttattgttttgagacagggtttgtctgcataactgtggctgtcctggaactcacactgtagaccagggtgactcagaaatccacctacctctgcccccagagtgctggcatgaaaggtgtgtgccaccacacccggctgccttttaaattttttttttgatagtgttgttttcttaaaggcttgggggtatgtagcaagccttagcctactctgtggcactttctgactgtgagcaagttccttggactctgaatgtcactttccagatctcttttccaggcatgtcagggtcctcttccacactgggccactggggccctaatgagtcccctaagacttgggatagagaatgatgtgagttggtggtgtggcaccagtgggacagcagagtttccagtcaggtccctcctctcctgtctacccactcaggacagtgatccttagtagaggcccttggcatggttgtctttgcggaggaacttcctctgccctcttcacattacagagattcaagtgccaagtaaggggctggagctgatcactgtgcaactctacttccttactgctcagagtgacttttaaaactcatgtcatgtgcagagaaaatacaggaaatacagcaaacgtacaattccgtgaagagctggaagattgcggtcagtgagactgtccatgacttgtcccaggagtcaaggtccagcttcccttgcacactggttacttctccatgcctcggtgctgcccagcctgtggctgctccctggttcctagtgattcttttgcacactcttctcttacttttctgacctaattcccactttctcattttgtccactggtcagtgttaccaacaatccaagtagcatcgtcgtggtggtccatatcttctttggaggcctcgaggtcactgttaggagctgggagtctctgtctgtcataataagcttctatattaaataatttaaacaccatatctttggcaagtttgaagaccatcatctataaatatatctgaggtaagcaaacctaggttaaacttgaaaatatatctgagtttgataacaacaaccaggccaccatattaccctgtagatatatcagtcaaatggaccgctcaggtcctgtgtttatcttataagcatttttatcaatagatgtaagtatatccttagacattacaggagtggttagagtgcagttttcatttatagaccatagatgtgatgttgacaacttttaagaaataggtttggacttgtctatgaaactgaatagctcagagctgcagtcttgttatttcattgaaggccaatcatatagaactctacaagctggagggttgtgacatgattaacctgtatttttaaattatacattacatttttaaataagtctgacatgggacctcggtcctcttccctcctttaaagtgcatgatcccatttttaacataatcattttgcagtgaagaatcaccagcattttttaaaatgaagaaaaccaaccagaattaacctaatatggtcaaatttccaacatattttatggctttctttcaaatttagtattttcaggtatgaaaaaaaccaaagcaaagcaaatatagttcacagcccctctggccttctacagccccctaaatatcctcaggtcaggattttcctatctccgctcctctgtttcagtcaggcatttttattttagacaaactcctcttttccttttttacttgattattttggtctcctgtcttttattttgtttttcaaataacatgaaaactttcatcaaagtccttcttgtggtttctttcagtagtctagaatattgtataggtctaataccttaaacaacaccagaaacttgcatacaccataacaaaaataaccctaagtttgcatcaacacataaaagtccataccaacatgaaatatttgagactagtagtagtttttttattaccctgactaataataatttataaccaacccctctaaatgatgacaaatagttataacccatcgaatttgaatgaccaaaaaaacacattttcccccttgtggaaataagagcataatttttcctgcacataatatattttttgacttttattctgaagccaagacatgttaaagaatataggctggtctgattaggcagtttcttaggtagtgtcaggacaggaaagggttaaggtgggaaagcagcataggcaaggaccttggaggagtgtgaccacaggctgcagttgcatcaacagtagagaatttggcttaggaagggaggaggagcagtgtctgcacggtggtgcagcagctggtggcacagagtgcctggcagtcagtacttctgcagaagaccatcggttcccccaccaaattattaaccccagtctctgcttggctttttaagttctttaataatattttataagaacataattgaggacaaacagaacacacacatatacataaaaaaaaccaaacctaccagttttcgaaaaagaaactgaaaagatgcagaagatagcttatcccatgtttgggctccgcctagatgacaggaaccttcctaccagtggctaccataaccagattggagcttcttaactccagattgaaactccccagttccaccagaagggagtcctgagcttcctcagactccccaaccaagaggaagttaacgacaaatctgcccttcttcagtaggtctccagttttgtgtccagccaccagaccagcaccagttttgtgtctggtcaccagacaagatcgtttgtttttctctttgtccactcaccaaaccagaacaaagacacacccagactcactaatggcagagaacagaacatgctttcctagaaatcctctactaatgagttggggtccctagcatttcccagacaatgcaccaaatgtaaggctctgaggaaatgctgaaggaagactccagactcaaatagatgtaagagaagagtgtttattagtatttcagcatgaatgtggggtcattcatctgtacaaaatggcaaggacacctaggggagcatgtaggctccttttaagcacagttaaggggagttttagggacagttaggtcacctcaaattttattggttaaacaagcaggagttataatagtatacttttaattgactgcggttttcagccttatcatttttggacatacttgcgcaagtttgggcaagttttgatgtgactcagaaggggctactggatgtggtggtatattattatgatttattaaatagttaaatttattaaattacctgaggattcagaaagcaaagccagccattagctatagaggtcaggcagtggtgatacacacctttaatcccatcagccatactagctagccaggcagtggtggcacaccactttaaccccaggactcaggagacaggcagatagatctgagttcaaggccactctggcttacacaagagtgaagagtaacagagatcttgttactcttgggatcacacgcctttaatccaggcactagggagatggagacaggaggatatggctgggctgagaaaggaataggaggaggagacaggaattcagagcttttgcccctgaggattagtggggacaggatggccatttcagctgggtagagggaagagctactggcttggttgctttgcttctctgatcttcagcttgaagtttaaaccccaatatccatccctgtatcttttatttactgtgttacaactggatttatccttgagacattgtgaggctggtttaggcctcctcataaatgtaagggcgttgtagataaatggccctttgtgggagagacccctgcttttgcccttctcagagaactgaacctagactcagttgtgagaggagagtcggaaagtttaaccccttcagcataggaagggattttcaaagagaaggtctttgagctaagagctgagcatagagaaggagtaggttatatggggtccagtacagggggagagaaggaggtggtcttgagcatgggacaaagacccatgtgctggggctgcacagcagcaaggagtagggagaggaggacactgtgtgagaggcagggctgagcgggctactgcggggctgacgtcacaaatgagcgattgtgtgcaaaggcagggctgagccggctgctgcagggctgacgtcacaaatgagcgattgtgtgcaaaggcagggctaagcgggctgctgcagggctgacgtcacaaatgtgcgattgtgtgcaaaggcagggctgagcgggctgctgcagggctgacgtcacaaatgtgcgattgtgtgcaaaggcagggctgagccggctgctgcagggctgacatcacaaatgtgcgattgtgtgcaaaggcagggctgagccggctgctgcagggctgacgtcacaaatgagcaattgtgtgcaaaggcagggctgagcgggctgctgcagggctgacgtcacaaatgtgcgattgtgtgcaaaggcagggctgagcgggctgctgcagggctgacgtcacaaatgagcgattgtgtgcaaaggcagggctgagccggctgctgcagggctgacgtcacaaatgtgccattgtgtgcaatgtgtgtatgtgacatgatggcttctctttccttctcagctttccttattcctgcgagccccaggtggaggcagaaccccctggagtgtgagatggtagagtggaggaacgcgccatcactgtggataaccgtcttccaaattaccggaactctgtctcagcattcagatacccagtttctaattagagacaccgcttcccagccccttcttccacaggcgggctaggaggctctttgtggatatataactgaagggtgccatcacagacagtagacaggccttaaacatagaatgagggtgtttctaagatcctggattctaagatctagctgattctagttctggttccccactactgaaagaggaagctggccaacttgaaagaagttacttcccatttgggatcctcatttttcttttcttttaagtgagggccagaccgtccactttacactgtgcacatgagaagtgtgtggtgttaaactgaagcaggatggtccttccccaaggcatccatgcactgctctccgagcttttgaaaacaggtcatgggactatggaaatggctcagggggcaaaatgcttgaggtaccagcatgtagatccggtttaaggctccagaaagtacataaagctgggtgcatagagggtgccgagtgggaccccacttaagactgttggtgtgtaccatcacagtctctgagcctgcctagtccttcttgtggggaggaaactgaaattcccaagtactaatgtaaccatataacttagagaaaagacttttttaattaaagcaaattttaatggtaaaaatcatgtagtaaagcaggtatttcatgtgtttacaaagtgatagacatgagagaggacaccaccaggaatgataattcaataagcaagcaccctataggcggagatgagcactgtaaccgtcaggctgactgaaaaccagagtgaattcttgatccagaaatctgagtttaaattgtagcaagacagcttctgaccatcactaatcccaagtttagccaggcaaaaaatcaggctgggaagacagctcattggcagaactcttgctgggcatgtatgacgccctaaattaaattaccagtgagagagagaggctggggagatatttccacattgtcagctattatcaagcttcaggttttctttggctttggtgatatttagtccagaacctcattcccttttggaggcctttttatccttgagtagggactcagtgtgtcatccatcacaaaatcatataatactttcacccaggaggtgtgatgggggagtttatcgtagtattcagctgctattttcctcacctggaagtgaaaaaaaaaaaaccatcaaagtgaactgagtgttactgaggcctcaagaggacaggtgagagtatctgacagacagagggacaaaatactgaacaggcaaagggcaacacctttgttcatggtccttcagacagcctgcagttcttacgaataaggacaatctacagatcgcacgcacaattaaaaataactcaattaacaataaaattcctttgcagagtgaacatcagctggccacgctgagctgatgggcttggttaaggtggggtttttgtttccttctctgggaagtttattcacgtgtgcagcgtagctgataggatcaatccctgtcctgccgtctccctcccagttgcctgtctttctcataaccactgagttattccaccaggcaatacatcttgcacatcttgtaacacttctgaatcataattgtagtggccaaatgtaggaggaatccaagagcgtgaacatcactaaaattagactgtgagacactgatacacactatgctttgtgcctttttaagtgaatttttgtttgataatatataccagttttcttttaaaatgggtgagtgaagactaatttgggtcagaaactaaaacaataaatcaaaacttcacttacctgtggaaggcggcttccaggaacactggggaagtcatgatgctcattatggtagcccccattgaacatgagaaagttcagaggcccataatatgagttggtgtcttgtccctttaagaacatgtaatggtcagctatgaaatgcccagaaattgggttcaaacccaggccgagtagggtggctgccaacatgtagactaaagacttaattccccaaacatagtaaattataatgttgaaagttatctggctcacaatattgatattttccagagaagtaaatggtttggggttgacgaaataaggtcgcaaaaaaataaacaaaggctgaaaaacaacccagacaagcttcctgacagtggtgcagaagaaccagccctcaaaatgagaaggggcatccacatcgatgccagcagctccgaggtaccgatggtgatccatgtgatacattttgtaggaaatggagtatggaaccccaatagggaggttagcaaatattccaaaccagcggttccacagcgccttgtggtggccaaaggggaaattatgggaaatctcatggatccccagagtcattgagtggttaatggagctgccaaagacaacggcccaaaatatgacccatttccagtccaagtctttcactaagtaaaatgaagccaactgggtgagaaccatcacagttatgatccagatcaggttggggtcaggtttcatcaaggatttgatctccggatattttgctgtaagaaaaaaaatacaagaataacagtggagaaaaatacaattataattataagaaaccacagtgaacacacctgaagagagagctcagttggtgaacttcttgctgtgcaagcatggggacttgagtttgacctccagaacccaagcgaaagagcccagcttgctggcatgatcttttctcttttctttttaggtttttgaaaaagagttttgtagggaaaaagcatgattagaggtaccgctgaccatgccagcttgggcgtggtcacaggtaatgctaaccactccggcttgggctggacagagtgacgttggaaaggtttaagtagttcaggggcatgtacagggctcccttctctcgctccctgcggccggctaagtggatctgcgtgagtactatttcttaataaactatctgttctcaatctgatcaccaatagggtttctctgtgtaacaatcctggctggcctcaaagtcacagagatcctcctgcttctgcctcccaagtgcttgggttaaagacgtgcacccatgatgctagcatatcttttaatccccatgctaaggaggcagaggtaggtggatccttgggcctcactgtccagccagcacacacctggtgcaaatgtatacacttagacatacacacatcaagtaagtcctcctagttcaatatttagctttctatagctaactagtgtggctggttttgcattctgataacttcagacaatccttgttaaatcataaataatatgtcaccacaattaccctctgttacatgactagttggcagacatcttccattttgtacatggttctctgtatatctgtctatctctgttgattgccctcttcgctctgcagaagctactcagtttagtaaaaccctgtttttcagttttcactgtgtttgcctttaaactccaatccagaagattgttgcctgtatcaatatcttcacttgtatttcctatgaattcttttggttgtttctggtcttacacttaggtatttgatgcattttgaggttttatcttgctttgttttaatttgagacagagttcctccacataacctggctggactggactaaaggcatgtgccaccaagcccagtttgagtcagtttattaatatgttgataggcataaaatttcaatatcatatatgtcgatacttcaattatttttgtatgtctatttttccatcagtatattttgagctatttatttacatatctctttctgaccaagtatatttttggacatagagatactaaggatttttaaataaatttaaaaattattttataccaactgggcagcatggtagagcttttaatcccagcactcaaaaaacagaggccattaggtgtctgtgatttcaaagccagcagggactacaaagcaagttcctagacatccggggcttcacagagaaaccctgtcatccatatgagtgttttgcctgaatgtatgcacatgtaccatgtgcaagcctacccttagaggctagagtacagtgtcggatacccgtgcactgaagtaacagatgtttgtgaactgtcatgccagtgctggaaaccaaatctggatcttctgcagagcagtaaatcctcttaactgctgagccatctctccagccccagaggtacagagttttttaaagatgtatttttgccatgttggctaaattggtctcaaacttgtgggttcatgcagacctcctgccttgacctcccaagtagctagtacacaggtgtgcaccgccataaccagcaaataagctacgtattatatgttgactttatgttctgctatgtccctgaatttgtcagttccaaaaccatgtgtggagtccactttcctacatgtacagtcacatgggcaaacagaaaatatgaccttccaggtccttatttcctgcctctcttttgcctgtttgctctcttttcttttcttttctttttttttttttttgtttttttttttgttttttgggtttttttgtttttcgagacagggtttcactgtgtagctttggagcctatcctggaactcgctctggaaaccaggctggcctcaaactcacagagatctgcctgcctcagcctccccagtgctgggattaaaggcgtgtgccaccaccgcccagcctaagtacacacttaaagatgctgttcattgaactaaaacatacccggcgcctgtctgctctttctaaaacttcttagtattatacagaattgagccttcttcctggatgtggaggaaatactttcagttctctccccatccagtatgacgtcggctgggcctcacataggctgtacaaacactcagcccctgggctacagccccagcccattctcatcagctctttgccaagcatttcactcacagcaattctcagggcttctgctgctaagaagtcactttgctccttttgggcatcatgttacatatttcacaccaattctgtacatttgagattttggggtgtgtctggtagatcagatatctctgccattttatggaattcttaggaagtgagtggttttcccttgaagatgtgccttcaggtgtcagtttgctgtgcaagtttatttccattatagtctccgtattccatctgtggctgtgagtgatggctttggcacaatgtatactatgcagagtcagcaagagccactgtcctccagggtgttatgacagtggggacacgctaatggttcaagcagtgtgctgtagacagcagggggacgagatgctcacagtgtagcttctcccacagtgcaactggtattcctggagggaggtgggcactgttgaggctagctctgcaggggcaagggtctgtggccctgtcagctccagcagggtgaagtgctgaagcccttgtcctccgaggtgtgggctcaaagaggcagcagtgggaagcacagcaccccctctttggcccttgtaccccgacacactctttgagctgaagtgtgtcccaggagtagaagcccatcggaatagagctgggtggagtttctctccacccccgttgtccgtgtatacccacagggggattgtttgtaaagcacaaggtggacttttaacactaattctaactgtagatttaaagtgtatggatttgtttcttcctccaaagtaaagacatatatttcagaagtacattgtcattttgatgatgcaatttaaataaatccccagattcttcttccttaaagttattttgtttctccactgagtggagaacactgagtggcaaaatgttatttttcactaagaaatataaagtccattcagccttttcaggtgagatggttcattggtgataagtttgtgcggaaaggctcaaggctgagaaaagcatcaattaacactttcctgagtccttgattttcttactattaaagaaaaagctaagtttaagagtcagtttttgtaaggatgaacatcacattattctaatgcaatatgtacatgtatagatataatggatgatatctcataaaaatatgtgcaagttgctgggcgttggtggcaaactcctttaatcccagcacttgggaggcagaagcagccagacctctgtgagtttgaggccagcctggtatacagatggagtgtcaggacactccatcttcaaagatacacagagaaaccctatgtcagaaaaacaacaacaaaaaatgtacaagtaagctgcaatattgtttggagagagagaagaaaccctgaaataggtagaattctttaaaatgctgtcttaccatgaaacttaaaggttctcacacccatagtgttaattcattcatgaaatgagagatttctgaatttagatactcataattggggtctgatctttttcttggtcaaatggacatcaagagaaaactagggaactattttgtataggagctccaggggcgtgccacagtgtggagctgctgtgtgaaccctgggtttggtcccagcactggagggaggggctcctcacattcaaagcccctcccattagtgtctttggttttcaacagagaacaggttaagagcatgctcttcgcaggcagtctaacccaggttagcatcctcctccgagcatctatccccttcattctcactgcattttttaaaaggcagaaaagtcaaaacactggcatgaggatgagttaggcagtgtagtaaagaagccaactcaaaagcctgttgggtcatgaagagcagcctgggagagaggagagacttccctgtggacacagaagtactcagtataccctagagctggaagacttggttggtctggctttaaagccctaaacaactgtcaggacaaggaggcatttctgtatttagctggacatctgtgtttctatttctttaccctgacaaccaaaaaagatgagaattgtctatgaactgcccttggcgtcccaggtttgtggtagagttacacagacaggagatgtgagcacaccaggacctgtgttctccaacaagccccgtggtcccagggttgtggtgtccactcactgggacttacctgcattgtttcaggtatacttaaggcaccccaggatttcccaggaccacctccttagcctcacgctccagtggctggctacttaggaaaaccactgcccactggacatcctaagagtctcctagctagcggataaggcctgggatgtctcagtctggtgctccacaacctgaatcagcaggttgggtagagggtgccttgttcagggactggcctgtgcctcttcaccaaacagatagtacatcttgggtatctatgaagtcccatgcatccccgaggctgtgagcaccttgagcctagcccaggcctctccttctgttggggacctgagcagtggccgcactgcacactctggagcatacgcacaagacctcacccaggatctcccgcctcctctgtgcatgcggctcatccgtgtcgacccactcaaaatcttcccgagaaactcggctccccatggctccgtgcggacttctccggcttctgttccacgtccaaagctctcgaatgcaaaggaggtagaggctgctgcaggctccggtgtgcaggtgcctgtgtcaggttgagtaaagtaacaggagggcagagcctcgcccgtcccgccccctcaccccactcactgccctctggctcctagctctggggctagaccaaagtgttgctagattcaaggttctgtggctcgtgagcgcctgtgtggtccagctccggctctcccgcaggtgtccagtgccagtcccttgttcctggacaagatgaaaaaggaaggaaatgtttccaggtagacaaggctgctgctcagaacctcctggaactgaggatcaggagctggctacaactccacaaaggcaggccgatgcccgctttaatactcagcagcaacccggattgtgtttagtttccaaagttaatgatcagcggaccgtgcgtgtctgccttctaaactgtgaagcttctcctgcccagaaggaaaaggcaggctgcatggcgctgaaaagccactaaacaagatggaaacatgattcttgggatgctatgagtctcagggttatgcagtcgttatccagcctcatttcatgacaccagcccatcagaatccagggttctgtcggaggactaaaccaagatactaggcatgttggaactattgccttgtgaataaagtggctgtttcttgctgtagatggcttgtgtaggttaaccccatctgttacaaacttgggacttatttcccacagttcagcactatctgatcatttattgggtacaagttcccctatgtatttggagtatattgataacattccctagatatgtgtgaaaacagtcactcagtcaaaaaacctgttttcccattaccaggtctttgctccttttccaaagtaaacatagagatctgccctcctgtagttatctttattggcaggcatttggtcagtgctaagagtccaggcaaaagtatttcctttaagacatcccctgctatctaaggaaacagaattactatgtgcctaaaactgttgattcattgccatttagatagaaaagaagcatgccctggtttcgcctcactgcagataagagaagtgataacctatactaaccccgcactaaaacatcctcatacttcttccatttaccttcatctcggtttctttcttttttgttttttgtttttcaagacagggtttctctgtgtagctttggaggctgacctggaactagcttttgtagacctggctgatctcgaactcacagagatccacctgcctctgcctcctcatctcagtttcttaatccaagattttagcttagagatttactgcttgtatttacccagagaaaataatgagaaaggtagtcagcccatttgctactcctcagaggagaagtctgttttcctgcagacctgctgaggacctgcactgccaagccaggttctgtttcttgtgcaaattaaacttaaatcctctctttattttgcagccttaagtgataggtgctatctttggacctaaaaagcttcttttaagcagcaagctatagcaaaaatgctgcaacagaccagagctgcaagtattcctccgctgctcatgcaggttgtctagctacccagaatgcttacccagcccatgaagataagcacacgatttctcccttttagattcccttgttgatttaatccttagttgacctcattgaggaaccttcactaaccacaccaggtctacctagtaccataaatgaaagctgacagttattgctctgtgtgtaaatcttacctgccttggtgaccctgagaaactcaagcctcacattgcattggcaaaagaattatgattgtaaatgtgtacatactggttaccccaagaatttgtggtagaatgacaacaacaaaaagaacatgtgaatagattatttttctttaaccctcagattttagtcccttcatttattgtagcatcttttttgaaccctgagtgaaaactttagagacagaccctttaaagtttttgatattgtgaagggggaagatgacatggaatctgtcattctgatgtatgcatttctttcatggaggtcgtgaagaacttcatgaggagatatttgtttctaaattaactacctcttctgtgtccaaacaattaactaggactaggattgcagaagggtagacagctcacttcctaataaaagacacaccatgcgcaccaagtgtacactgtacatgccacaccatatacccaaacctgttcagatccctggatcagattgtcactgtacagaaactagggaggacagggaccatgcctggacacaccacagggatgctgtcagcctgagccatccatagggagcaccatcctacagtgaccaggtatctttaataattatattccaaggaacataaagaaagggtaacctgagaattaaaggccgtttaaaagaagtatcaactagcttcaatatgcttgtcttactaacattcatatgcaaagattcctagttttaaaaactgatttggcatttaattcagataggtggagttgttaagaagtgactgttaaaaagttcactggggacctggacactggtggcatatgtctttattcccagcactcgagaggcagaagcaggcagatctcagtgagtttgaaaccagcctggtctacagagcaagttctaggacattgaaggctacacaaagaaaccctctcttgaaaaaccaaaagaagaggaggaggaggaggaggaggaagaggagaaatttaatggggatatggttttattattaaagtttctcagaagagttcttctcctttagaaggaagtagcagataaatgccagggaaaagtaccctaagctaaaacagatacagtatgaagctatactgtgctactgctgtaagctacagttctcggggtatcgatatgaaatggtccccaaggaatatgttaaatataaagcagcaggcatgaagaggatggtggctggacataataaatgtacttgcttccttgcatatgcacaaaatacgcaagatgtccaacgagtgattgattacattgtgccagagtaggtgagaggatgagaatggaattttctcccgctaagtgtaaacagtgatcctcctgtctcttcctccagggtgctgggattgcagtgtgcaccacatcaccaaggcaccaggaatgtttatgtaatgttcctaggaatattttctttgtttgttttaaaacctgcaaaagcatctcttcagttacttcccagttccctcctcaaagctccatgttcctcatggactggggggaggctcagcccaacagtgatctctgtccagcagtgctccccacccttggctgtagagggtgggaacatgtgttcactctgagcactcaacttgcccactgcatgaggaaaagcagtttttcctcacacccctgtcctatttctccagccaaacccagactttttatttgctgtcagcacccctgattcagaacttaaactagtgccagcttaggccattttctccattccctcttgatatcagagcctaagtgtgtgtcctaagctggtatctaacagatgaattttggaggagacacttattctgtaggaggcagaatattattaacatatgaagaaaggtcataatgatggggcagaatggaggttccaggaagaaatcctatgaacatgagtgccgtaaggtcaatgaagaagaggaaagagttttaagtgagataaacccactccgctgtacactaacacagttcaggtggactataactaaaatgtggagctgaaactaaattgtttttaatcttagttgacatataatttattacatttagggaggatttatcaaaagacaaaaagcataaactatcatggaaatacattggtcactaaggtcagtggtcaaggggcatgtttagcttgaaaagacttgagccccagtcctggaaccaccaacaaagagaaaaaggagaagagttcagatctgtttatcacaagacaggaatggaaagtcaagccaagagaaagtactgcactgtgattgatcaagaaagggttctgatttaaaatacaaggaggactcttagtgtgctcagtgggaagaaaaggggaaacaaaaaacaaaagacttaccaagataagaagcaccttggcttcccaggcaagggctaataaggaggagcacaccctttcaagtcttgataacaaaaggattctattgtgatacaatggttacacagatagtgcaaagttcagagtaatgtggacacggaagacactgtgcctcagtaggaaggtctccttctcaggcaggagacagtggtaccttggcagcacattacctcatgagaacagagtcatacagggcccatctggcaggaccctggagcccaaactatagcaagtgggacttgaggcaaagaaaagaagggacagatggttggctgcttcttctttccccgtctctcactaggtgagagaatccagctcatataggagccttagaaacacctgcagggcccgctgctctgcagagcagggtagaaaagcccaaaggcatgagtctgggagtaaacaggtatgccccacccacccaacccattatcacaggcatgtgggtagaagccacagtaggatacaatttcagaaactcccactaccagagtgaaggtaagggcagctctgtgtatctactctgcagcaaagcaatcctaaaacaatccatgagattatggtaacaatgaaacctctctagaaatggtggatggatgaaagacccgagctaacatggggttagcttgttaaacaactataataaagcctcgtgcagtttgcatcaagctttcgaacctgcctggtgattggggtgaccgaggtcctgggctgagacccgggaggcctgagctttccggggggtcttacagtctcagggacgcacagctcatcaacattcacccaagaaatctgagtgtctctaaggggtgtgtcccgtgcttggagccatgagcagcgctgtgtctgttcttcccagctcagcatcacagaggcatccctgacagactgtctggcctcagttcccagcccaggattacagtgcctccatggagggcaggaggccagcatttctcattcccttccaccttctccgtgttgcaaagacaggagagcgtggcaagcaaacaagggctacattcacactcccacccttgactcaatggagtctctacaggaatggcagaaggctaagaaaagctgaaccagcgccctcactctgctcactggtagggaagtggctctgtagtggggaaggcaagtgagaagaccagaggaaacaaaacccagctctcacagaactctgctgacaaagagacgtgtgtggagaaggaagccagcttctgtcctcacctttagggaaattgactctggacttcttgaaagagagaagacaagtcctgagaacagagttccaaagctttctccaaagaaaggacgctgtttaggacagaatgtgaggaaactcaaggcttagagtacgtacaaaaacaagacatttggtagttggcagctaagaggaggcttaagaccagccagcttaaatcatgctccattagattatcagaaaaccagtgaaggagacaaggaggtaccatcaggggtcagacacatcttaaccaatggatgcactgtcttcccctacagcccactgttgtctcaatgataagagtcaggccctggattccatctttagcaacagaaagtcccacaagttaaaagtcccctgtgggtggacatgtttgggtgtgccaacaaaagctcactctgtgagttgctgcctcagtcagtctcccttctttcctggtggtctaaagttgggtccacagccaagactcaagggcaaagacagattgtatcataccggctggggttagctgatgtggggagattgcagcctgtctggtcctccaaaccctagaggagctgaatatagtggaaaaaggaacaagaactcaaggatatgatggtctattctggacacaaccattggacagataggtgacagtggccagcaagagttaaaacagatagtaatggatttacaaattgtctcacttggggagaaaaagcgtgacattattaaatgtgtgttttacagtttaccagccattcgatgtcttagaaattggcaggtgaactctctgtagagtctttactcttttgctgtcatccagtctctgttgacctctgcagtccctgggaccctctttattcttgggttgcttcctttgttttcctaaggtctttccccctcatgcaggccatgtcttttaagcatgtaagttgaggctcattttcctttcaaatccatcacaaatcatgccaaagcaagttgtcctgccaccaccaaaatgggttcagaatccagttataaaaatgacatctggtgtggttttgtacattttcctaaatttccccccagaatttctgtcttaggtactgttgccttcccagggcgtcttagttggggtttctgttgctgcagtgaaacaccatgaccaaaaagcaaattggggagaaaagggttttatttggcttacacttccttgtgctgttcttcaccaaaggaagtcaggacaggaactgaaacagggcaggatcctggaggcaggagctgatgcagaggccatggaggagggctgcttacatggtttgctcagcctgctttcctatagaagtcaggaccattagctcagggatggcaccatccaccgtggtctgtgccctccctcattgatcactgactgagaaaatgccttacagctgcatctcatggatgcatttcctcagctgaggctccttcctccctggtgactctagcttgcgtcaagttgacacacaaaatcagccagagcacagggtaaagagcatcagctactatgtgtttcctctgaagtagattggtcatgaagttcctgatcagagtaactcctgcatcactcatgatgactgcaatcctcaagccgtcaaggaggtaaaagtagcaatattaactattgatgaggatgtaagagaaatggattgcccatataattttgagaggctgtaaaatgttatcatcattatggaaaataattttgcatttgttattaagttaaccatacatttgccatatgactgacttggctattctattctttgctcttttacccagagaagtttgtacttgcttaaataaaggttaatatgtcatcttgaaacttttatgcgcacccaaaactagaaataatttggtcatcagtagctgacaggctaaacaaattctggtataattaactatattatatactgctcctatagcaatgtgtttgttggggtgatggctaaagaaactcttattttataccaggcatccatcttggtacccactagccattggattctgactctagtccctggaagataagttgctagtaacccagattcagagaccccccacccagaaacatacatccatgatcacctacttgttatgatatgattaactgacttttttggcttctataacttgcttttacagatacccaaagattgttttgggtcatttaacttggccgaacagaccatttgttgctggcttgcttagatagtgaaggtcttcttgtagcttttgcttttaaaaacactttcccatacctctgtgctgtggaatattcctgtactctgtgtaaattatgatctgattggtttaataaaaaagctgaccaataaccaggcaggataaggttagggggaacagccaaactaaggaagggaagaagaatggtggagtcagaagagatgccagccagttgcccaagaaccaaaacatgctaaaggacaggtaaagccacaaaccatgaggcaatacatagattaatagaaatgggttaattcaagtgtaacagctagttagtaataagcctgagctatcagccaagcatttataatcacattcagcctctgagaacaggacagtagaactaagaggacctggagccaggcgagtgaaatagagggctttatgggtggtacttgctatggtttagagccacaccaaatatctctcatctaaacattgagacaagatgtttaagaacagctatactgactagtatcaatcccaggcactgttaacatttctttttaaaaacaaatataattatctttattttcctgcatatctttgagaagtagtctctgtttgtcatttgttttatacaaatagttttaaatgtgataaaactaaacttggccaaaatgtacatctgaatcaaacgtttattaactatgaagactaaatggaattttttcccatcaaacaagaaaaataattccatcttcatctctttctggctctgtgagttttaaaagtggtgtccagcatgaaggtacaatacgtaaggattcaggcattatgctgacctgcccctgtcacctgccagaatgtactcaggcagtatcctggtcagctcaaagttccatggttgcatattcttcacgcaggtgcgaaggaccctcgaaggacccctttaaaagaaagaccccggccatttacactctctttccggttctatttgccagctctctgtttcacactctctttctgctgttcccctggggcagacaggacttttcctgtctccctcttctcttctgtcctctctgtctctgtctctttcgtcttttttcttccctcttccctcccctttctaataaaacttctcacacaagttctgtctgcctggcgtggttgtgtcgtctctgtgcccccccccccagaatccaccaaggtttcccacccaatttttcataacaatacagcaaatgactccagctttcagtgtttccagttaagtcccacttaagcacacggctctggcctttaagagcacacacaacaggcttggcaaaactgaactgagctcagtagttccgcgcttgatgtgttttcttaattcctgacctctgttttggaaaagctgtactgttttcagaatattgccatccgatcatctttcacagtaggtagggtaaactatgtttgcctcataatatgtctgctaccaaaaatttgcagaatttgtcaagaaaaacaatgtgtatgcaaaactaaaaatgtttacaaaaaaaagtataggaagtaagaattcctgccaaagtaaagaccatagaaaactgagaataccgatggtacatgtaaatgtcaccagtgaaagttacctatggaaataaccaacgcccagaacatttaatatttactaggcattagtaacttccaactcctttatggtgtcctctgccaggataaatcatggagcctaatgacccgtgtgctcatctccagggcttctttatcttatctgaatccatcttcactccagtaaataataaaccacgggcgtttttttgtgttttaattccggggtgaatccaggacctcgtcctgactaagcacgtcccctgacactaagctgaatctccagggcagcccacagctagtatttatgcacgtgtttaatagaaagtttttttaaatattttatttatttattatgtatacaacattctgcttccatgtatatctgcaggccagaagagagcaccagatctcataacggatggttgagagccaccatgtggttgctgggaattgaactcaggacctctggaagagcagccggtgctcttaacctctgagccatctctctagccccctaatagaaagttttaattaataaagtaacagtaaacgttcacagtctctctctctctctctctctctctctgtctctctctgtctctctctctcaatacaccagtgccttatgcatgccaagtacacactctactactgaactacacctctagcctcagtacatttatttctgtggtacaaagagaacagtacttagctctgaggttatttatacatggctattactcagtatgggagaaatgtgaaaatttataactctttaggaaacatttctcaaaacaaaaaccaacacaaacaaaaaccatcttggctttcctcctctatctcctgcaaattatgagtcttggcagataatctctatcgtgttcattacaatattaacaatttgttacatcttctttatttaatgtgtgtgtgtttatgtgtgtgcacacgtggacatgcatttgcacatgtaccatggtgtgcatgaagagtcagaagacaactagaaagagtttggtttctcctttcaccatgtatttgtgtcccaggaatcctgtcaggtgtcaggtttggtggccagtcccattacagtatctctgacatcgtagcaaacacacattcaacactttttcttgagtatgaactcttgccagacatctctagagacgagtaagacttctactgtgtatcatttaattaggtaaaattaaatatagacttttaactgtgtttcacatgaataacacatgataactgcacagaagccaaccagacacattcattcgtaaatattcatttagagaagtagagaattctgacagtctgtatgtgtatctgttttgtgtgttgtgtgtgtctgtgtgtgtgatgtgtgcatgcctgtctttttcagttgttacccaccttatttttttgagacaggagctctctctgcactgtctctacctgcccaggctgggatcacaggtgcccatcactgagagttactttttattcttaaatgtggattctgcggattgaactcgggtcctcatgcctgtggagcagaattttgccaactgggccatctcctcgggccactcctcagacatgatgcaaacatcacttcataattttaatacttgtagatttactctggtgggctgtgttgatacacacctgtaattccagcagtctgggagctatggcagcgagacctcacgtttaaggtcaatgtcagtaacagaatattccaggccagactgaggtacataacaagactttgtctctgaatgaaaaaaaaaaaaagaaccttgaaacatgaaagtttacaaaggaaagtaattgttctgggtaagccattcagttttacctttcggtgataaagcagatagagactgggaatcacacacttgataaaatttgatttgatggttgtgaggaaggaaagcacccctgtatgaatggcctgagcaccgtcaagggcccagtgcctcagaccaaagggcatacaaggccttcccccatccagttccaggtgttgtcagtctgtgctgatgactgctgcctgagactgctcgacaccgaggcacctgtcaagactaccagcttgccttttgttcagctgcatgcagtaaatacatggagtttccaggctgctggtacatctgcatcagcacacaacccacccaattccagcttccctgaaagtgcctgtcgtcacttcattccatatctccctgtttagaacaaccacaaagccacgtaacttgcatcaaacggtggcagcctcattttcataacagctaggacacctgcaaaactagctaagcaatagtttctgctctctggcactctccagaattatacaaatcaacagactgtaagttgtactgtggatcgaaattgtaagcaatccacatgtctcagctaaagcatcttgcattgttggcttagaaatcttcactaacctgtatggatgagtgagacgctgtgcacagaagtacttgctaaagaccaaggaagcaaatacttgcaaaatgtcctttatttggtgctggaagattctttttttttttttaattgtttttgcttttcattttataacagctttggcagtcctggcactcgctctgaagaccaggctggcctcgaactcaaagagctccaccttcgtctgcctcccgagtggtgggattaaaggcgtgcactcccactggcccggctggttaattcttttaactagatctctacaatgcccctgcttccagtgaggctaacggactcccagaatggtttgcctagaaagaagataccggtgccgcccaggaggtggcgctcggaagtcagggaggtcctggaccgatggaggcgtgaagtcctgggtaaagttccacccacagccacaccataaccccttcgtgtctggtaaaagttctttgcatcgctgagctatggtacgaatatggcaactgggatgcaaagtctcctgtattctccacaggctgaccttaaataaaccaccaatttctgactccagttttgtttgtttgtttgtttgtttgtttcagagcggcatatagttagtatgttcttagatttctaacacagggagcccacctgtagttgagcaagacaggccagttcatctgcagggatgagagcgctcccagcagatgggggagggagctgttcctgtaatctggtgtcagaagggactaaaggcgctttggtttttgtcagctatagagagggctgaacagggcggctggctctgagctgctgccagatagtgtgtgagagtcgagctttgtggtcctagaagagctgaggatgtgcttgggggagacacctggctgcttctagctccctttgctttgtctcaggtgtgtccatgctaggtctgagttacacattgcagagttgccttgtctagcgtccatgtgcaggaattactcgtgtttgattttaaaaacagctttggtagctcacggttcatattgtcatcagttctcggcatctttgtgttaatcacaagagggtttttgcgactctttaattttattgtgtactttgcttaggttttgggtgcatgctgtactcagacataggttcccaatctacattcctgtccagggggagaagggcccacagccagccttctctgctgcccatctgattctcatcccccggggatggggagtctctcagaactgcgcacactgtccacagccttcccttcctcttcctctagccatgatgccgttctttgaacagaactgtacattggatatgtagcctagtatgctgatttaaattttctgttccctgatagagaggtgctcttattcgcatgctactgtttacctacattgtttgtctcttaaataaaactgagttgatatcactttattaatgagttaaagtagaaaccttgcttgttctggattaaagtctttataaactgtagaagctaaaaactatacatatacatttttccgatctgttttttgtttgttttttaattgctgcttcttcttggtttttcaagacaggccttttctgtgtagccttggctgtcctggaaatggctcagtagaccaggcaggcctcaaacaagtgctgggaataaaggcttgcaccaccactgcccagttccaatctgttttattccatacttgaatgtcctttagggaacactagtttttcaattaaagaaaatcttttcatcttgcatggtattcttttgtcataagaaatcttgtacttaccaagtttgcaaaattttcttttttggaaatatggtattgtccattttccatttatgcaaacatcccaaacaccacttagtgttgaggattagtttcagcactgctacagatactgttagtgttcacgcatctgcactggcctgttgttggggttctgacaggacacgccctcagctgcagccactaagagcaccacctgtgcacattcactgtgttcccttttaaaaggccctgcccaccttccatccctctttctctgtctctttctcctctctctctctcttgtctctctctgtctctctctgtctctgtctctgtctctatctctctctctctcttttctccctctctgcttctgtccccagaggctggtctccctccttgcctttcccctttttatggtccttttccccttaataaaaaaaccctctacttgaattctgtcacgtggcatctttctctcttgaaccacattttaaaaaattacaacagatactacagtcaatggctactcagatcccgtcaataaaatgcagcattatttgcatacaatgtatatctgcccagcccttctctgaagtaggtgctggaggatatacagtccctatcacagtgaaaaattcacaccgccgtgtaatggctcatggtttggtaactgctacagaagaatgtatctacagataggaaaggtccctgggtgttcagtacagatgcagttgtcatccacaatattttttgatcatcagttgaagagagccctgagggggggaaaaaagtagtggaagactttgcatttgatgtgaggtagggattgtagttaatatttttccatgtggctgtctacagtagtccttgctgttgaaagagcattgctttcccagctggtgagatggctcagtgggtaaaaatacttgccacgcaaacttactgacctgagttcaatccctggacatatgagaaggtggaaagagaaaagcaacctcagagataccctctggccttcttcccctgaacgcagtggcatgcacacccctgactcaaacacacaccaccacaacaaataaacaaacaaacaaataaacaaatgattaaaaagtttaaaagacagtccgttggagagatggctcagtggttaagagcactggctgttctagaagtcctgagttcatttcccagcaaccacatggtggctcacaaccatctgtaatgagatctggcgccctcttttggcctgcagggatacatgggggcagaacataatatacacaataagtaaataaatctttttaaaaaatttttaaaagacttgacatttacttctttcctcagaggaccagcatgttaacttatgaaaatgaattggtcatatattcttggtgtcttttagtccctttgtatttctgcaaaacatttgccagcagtttctccaggaagacctgttgggaatttggatagcagcccatgggatctgtttatcaactggtaggactcaggaaaacctctttggggtctatatgtatgaactagtgatgtgacttgattctgttatcttctttatgaaatttctttattattttgtgtgtattatttaggtgtgttgcctatgtgtctatgtaccatgtgatgcagtgtccgtggaggccacaagagggcagaagataccctgttgtgaggcgccatgtggctaccgggaatggaacctgggtcctctggaagaacagccagcgcttttagccgctgcatggatatggtgtccacacagcaataagggaggagtctcctgcgtcctcaggcactgaaactcgcgttagtttaggacaccatgaccacagcaactcttctacagaaaacgaaatgcttacagtttcagaggttcagtcctttatcatcgtgagagggaacacagccgggtgaatgcagacgccatgctggctacatcttgaccaaaaggcatcaggaagttgaatgactgtcacactgagtgaaacttgagaaaaagacttcaaagcccatcctgaacaactaactctcttcctccaacaacgccatacctcctaatagtattgctgtctttgggggccactttctttcaaacaactgcaacctgcatgtggcatcccacacagagagtcagaactccaggccagtggatcagtcacttcccctccacaagaactaaagaaagtactcaaaaaaaaatctcttttgaaaggaaaatttaaactgtttcctctggtacccaggtaaccatatgaaataaagaaaagaatacaaaaaaaaaaaaaaaagcagtagatactgatgcattatgattaattccttagggtactagctattttaaaggtaaaaatttgtgacaaaaaccatatagtagaaatggacagttttacaatatgcttgcaaaatggcagacaagggtgaacactctctcagggatggctatggacaagcatacagctgagctctgggacagagtgagactgacaggaagcgtggcagcttcttgatattatggagatgaaattctttcggggcagcttctgagcatcactcaccttaattttaacaagaaaaaaatgcacattgtcagctatttaaaatctttgcagaatttgccttgactgagagtgcttctccaaaagctatttccctttctgaagcctcttcacccgtgtatagggactcagtgtgtcatccgtcataaaatcatacagtagtttgatccaggaggtgtgttgggggagtttatcgtaatattcagctgctattttcctcacctggaaacacagtaaggtgaacagtgagtgttactgagacctcaagagaacaggtgagtgtctgacacagacagagggctaaaatgccaactcaggcaaagggcaacacctttgctcatggtccttcaaactcctgaagttcttcatgaataagactacagactacacacacataaacagtctcggaatctgccccggacttatgacaaagcaatcagtttagcttagcagctagaatacaatgacactggagttccaaatttgtaaaacaacagagccagtcagagcctggataagcatttaagacattcattcagacaaaagtataatagcaaccaggatgacataaaagatgataaattataaacatttaagggacataagatggaaatgaatacattttcaacattatatccggattataaattctagggaatgtgttcagccatattattattaaaatgccaacataatacttggatgtctattgttgtaatgcaggtatgctgtatttataacatctatatgttttatgaagttgtaagtaattgagaaatgcaagcttactggtgggctatgagatcgctcagcagttaaaggcacctgctgtcaatcctaaagctctgaatccaattcccagaatctgttttgtgatattttgattgtgttctgacaaataaaacttgcttggagtcagagggcagagctagccactagctgagcatagaggtttgaaggactgtagacagaggagacaggaagtggtgggggtggggatacggaggatcttgacccttttggactaaggaatggaagagataggaaaagaaaactggtggctactccctgttctctgatatctcaggttcttaccccaatatctgactcccaaatttttattgataaagattaattagattactacttcaagaattcacatggtagaaggagagaaccaactctttacaaatgtcctctgacttccatgcaggcacacacacacacacacacacacacacacacacacagaggaaaatgtaaatattttttaagagttgtgtgaactgagccgggcgttggtggcgcacgcctttaatcccggcactcaggaggcagaggcaggtggatctctgtgagttcgagaccagcctggtctacaagagctagttccaggacagcctccaatgcacagagaaaccctgtctcgaaaaaccaaaaaaaaaaaaaaaaaaaaaaagttgtgtgaactgaaaatctcactaaaactaagtttttaaatagtttaaaagtttgaattttaaaatacttttgtaatggacatgttttgcaattgattaatgggatagctgcatactgtataaatactctaaaacctacttcaaatggctattttgtgtgtggattatacacacacaaacatacataaacacacatgtgtgtatatatagatagatatagatgtaattttttttttttttttggtttttcgagacagggtttctctgtgtagctttggagcctatcctggcactcactctggagaccaagctggccttgaactcacagagatctgcctgcctctgcctcccgagtgctgggattaaaggcgtgtgccaccaacgcccagtgtattttggtttttcaagacaaggattatcacgattaattactaatacaaagcccgaaatggtcaggatatctttaattggtaaatgccaaccgacaggaagcagagcaagccaaagcagcaggaaaagagccaccatgtgtgttccctgtccctttaaacctttagcgcttcaccctggcatcaccttgaccacaccctgactacaggcgtggtcaggcacacctgtagccagcccttaggaggcgtggttacggtgtcttcctacaaaggattctctgtgtagcactggttgtcctggaactagctctggagaccaggctagccttgaatttggagatctacctgcctctgcctcccaagtgctgggactaaaagtatgtggcattatgcctagcactgtgtatgagctgtgtttaaatatagctattaaacaaaagcattggaggtgtagctcagtgataacgtgtttgcctagcaagcattatgccatggtttcatctctagtaccacaaaaaagcaaacgaccaaacaaaatgcccattttattattgcattcccagtaatcatttaataggtataaaaatgtaaatattataatcaaccgcgtaaaataccagcaagttttcaagaaacaaacatgatgttccttgatatgtatcatagaatgttcgggaaatgctggactagcgaaacctagggatgtttgtaagattatctcagtaaaagaagacggcaggaagagagagagctgtggatcttaaggggttaacatgggccttaagtcaagatgtccaacctgagctaagttttcagttttagaatgtctacagaaagttacataacctttctatggggtttatgtttgaactaacattatcctttgaactagtgacttagactctaaggcagacccacttaaaaataataaaaaccccgggctagagagaaggctcagcaattatgagcaccttcattcttatagaggacccgagttcagttcccagcacccacggcagctcacaactgcctgtaactccagttccaggagctctaaccccctctctggtctccctgaacacaaaacatgcatatacgcagacacacacacacacacacacacacacacacacacacacacacagcagaggtcaaccaaagccacactagatattcagggcagactgacaccaaggaactgggggccggcatcacattccatgtgttccaggttgtgctcacacaagaggtgctgctttcctcagacactttatccttaaaaatgtaaccctgctgaacacagtggtcctcatgcacccatcactgctgaacacagtggtcctcatgcacccatcactgctgaacacagtggtcctcatgtgcccatcatgaggttgaaggtgtgacctgtgacagttaccctctgtaatgttctgcacaaaacaaacccacactctttgttccccttgatgaagttattgacattaaattgcagatctcgtgcatgagttccagaaaacttaacattggtatttcattcctcaatatgtgtttgcaaaaggtcactctgtaagccaggaaacacttttactacaacacattatacaaatctgtgcaagggaacaaatgatggtccatgccagggacttatatagcatcgcaaaatgatgtctacccgtttttcagagcacttatgcaggatttcatggttctaatggacaaaccaacttgctccaagtatttctgtactgaaatttcacaaagtagtcgtagcattttgtgaaccagcccaccccttttagcaaagcagatcggtgtgacagggacaaaagctccccccccccccccccgagatcgctgctcacttcacaggaggatttgtggcctaattctgagttgtgccccttgaaggaaagtggcccccataggaaggactgggaggtgcggccttgttggaggaggagtgtcactggggtgggctttgaggtttcaaaaacccatgcatgcctgctccagtctcattagcaccatgccagcctactgccatgctccctgtcatgatgatcatgggctaatcctctgaaactgtaaagccagcccctaatttataagttgccttggcaatggtgtctctttgcagcaataaaacagacactgagacactaaaacagttatttactggataacagactttacacctctcccaatacttctggaccttaaatgtaaccactgacttcaaggatttacaagagtaccattagtaaaaactaacccactgggtattagatgtatattatactttgatttttattttaatgagaaactttggttgataactagagcttcctttgaaaatgatccaatgaagactagtttggagtatacagctattagaaatgaaaatatttaccaaatctttcacttaccagaggtaggttttttccaggaatgttagggaagtcatggtgttcattatggtagcccaaattgaaggtcagtaaattcagaggcccataatatgagtatgtttcatgtccctttaagaacatgtaatgttcggatataaaatgcccagcaattgggtgcaaacccaggccaagcaaggaggctgccaacatgtagactagagatttaactccaaaaacatagtaaactataatgtcaaaaatgatctgtgtcacagtattgatgatttccagagaagtaattggtttcgggttgataactaaaggtcgtaaaatcacaaagagaggctgaaaagtaatccagacaaatttcctgaaagtagtgcagaagaaccagccctcaaaatcagtaggaatatctacgtcaaggccaccaactccgaggtaccgatgatgatctctgtggtatctcttataagaaaccgaaaatggaactcccaaagggaggttagcaaatattccaaaccagcggttccacagcgccctgcggttgccaaaggggaaattgtgggaaatctcatggatcgatgtcgttattgagttgttaatggtgctaccaaagacataagaccaaaataggacccacttccactccaagtcttggactaagtagaatgaaactagctgagcaagaaacatcatagatatgatccagatcaggttggggtcaggtttcatcaaggatttgatctctggatactttgctgtaaggaaagaaaatgtagtaagaatcataattggagattatgtaattataatcaattccgtttaagtgaacacactgaagaaattatacttgaaggagttggggagatggctcactgggtaagatcacttgctgtgtaagcatgaggaccctcttcaatttccagtactgaggcaaagctacaggcatacgccttaccctgcctgtaaggctaacactgaccctgcctgtaacactaacactaacactaatcctgcttgtaacactaacactaacccttcctgtaactaacactaacactaacactaacactctgcctgtaaggctaacacttaccctgcctgtaaggctaacactgaccctgcctgtaacactaacaccaacactaacactaacactaacactaactctgcctgtaacactaacactaaccctgcctgtaacactaacactaacactaacactaacccttcctgtaacactaacactaacattaacactaacactaacactaacccttcctgtaacactaacactaaccctgcctgtaacactaacactaaccctgcctgtaacactaacactaacactaacactaacccttcctgtaacactaacactaacactaacactaacactaacactaaccctgcctgtaacactaacactaacactaacactaacactaacactaaccctgcctgtaacactaacactaaccctgcctgtaacactaacactaacactaactcttcctgtaacactaacactaacactaacactaaccctgcctgtaaggctaacactgaccctgcctgtaaggctaacactggtacaatggaacaggaggatcctagggcttgctggccgccagccgagctccatgttcagtgagagaccctgtctcaaaggaatcatatgcagagtgacagagcaggacaatcaatgatggactctgtgcacataggtgctgtgaacccacacacatgtgtacatacaccatacacatataccatgtacacgtagatctctcacacatacacataagaaattatagtgaagttaacacattaattacatttttctcaaaatcataatattcccgttattaaaagcatacccaaatatttgcatgctacccggagacaatattttgatggcaagttctaatatactgtaacataataacttgagaacttactaaaaatctggaatgtccatatcttttcttcttgttcctcacctgcccaacagggtatcacaatgtacctctggctgtcccaggaactcacagtgtagacaaggctggccttgaactcacagagatctgcctgcctctgcatcctgagtgctgggattaaaggcgtgcaccaccaacgcccagctgaatagtccgcatcttttcaatgatgtgttctaactatactttggcagagccctggaatctttacatcattaacacatctgacaaaggataggtacattttaaggtgttctacaacgtgaaagttatcttcatggttctcatgaacaaatcaactcattccaagtcatctgtaatgaattttcaaaaagtagtaatagttaaaaactacaaaaatagatcaagagtgcctgcgtaacagaatgagacttttcatgaaatggttttaggacaacatgttatcaacatgtgggataccttcctttaagcatgcacaactattaattaaaactatgccaaagacctaatgatagaatcacaaaactcaaaggtcttcctgtcctctgtgatttgttgtgtcctacttaaaggtattggattaaagaaaacaagaaattggattgcattaaaatcttttccactgcaaatgatgccattgaaaaaatgaagactattccaaacatggaaaatcacatttggacgttatctacttgataagggaactttatgtagaatgtgtaatgaactttaaaagcttgcacaaacaagtgataataaaataggaaaactgcaaaatgtctgcataggtatttctccaaaaccacatatgtgatggctaaattggtagtcagttgactacctctggaattaactaaaacccaagcagctgggaacacctgtgatgcctttttcttgcttggattatttaaggtagaagatccatcctaaatccgggccaaactttgtggtggcagtccacataaaaggacaggaagaaggaagcttttgcttttttgcctgcttgtcctcactctcactggtagctcatccaccttattcccgaggcatttgtttgctggtgttagaccctgcttcttcaggatcccagtgcaggcagacgggcagcagctctctaggacttccctgggactccagctccagactgtggctgtagcatgaaaaataaaagacctagacactgatactggggttcaagcttcaagctgaagatcagagaagcaaagcagccaagccactagctcttccctctacccagctgaaacggccatcctgtccccaccaagcctcagactctaatccctgactgctggctttcctcaacatggctggagacaaattctctcatgagacccttttcttctcctttatgcttctcagatcctgggattaaagtcgtgggatcccaagtgctatgatctccattgtgtgagcggtttctcttttagactggatcatttcacgttgctcagttagatctgtctgcttgtcttctgaatcctggaataaacccctttctgtcctgactacccctgttccagaatgcggaggaaatactttcagttctctccccatccagtatgacgtcggctgtgcctcacataggctgtacaaacactcagcccctgggctacagccccagcccattctcatcagctctttgccaagcatttcactcacagcaattctcagggcttctgctgctaagaagtcactttgctccttttgggcatcatgttacatatttcacaccaattttgtacatttgggattttgggatgcgtctggtagatcagatatctctgccattttatggaattcttaggaagtgagtggttttcccttgaagacgtgccttcaggtgtcagtttgctgtacaagtttatttccattatagtctccgtattccatctgtggctgtgagtgatggctttggcacaatgtatgctatgcagagtcagcaagagccactgtcctccagggtgttatgacagtggggacacgctaatggttcaagcagtgtgctgtagacagcagggggacgagatgctcacagtgtagcttctcccacagtgcaactggtgttcctggagggaggtgggcactgttgaggctagctctgcaggggcaagggtctgtggccctgtcagctccagcagggtgaagtgctgaagcccttgtcctccgaggtgtgggctcaaagaggcagcagtgggaagcacagcaccccctctttggcccttgtaccccaacatactctttgagctgaagtgtgtcccaggagtagaagcccatcggaatagagctgggtggagtttctctccacccccttgtccgtgtatacccacagggggattgtttgtaaagcacaaggtggacttttaacactaactctaactgtagatttaaagtgtatggatgtcagctgtaaaaacagcatctatgggcctggcggtggtggtggtgcacacctttaattaaagtacttaagagacagagtgaggtgaatctttgtgaattcaagggtggcctggtctacaaagtgaattccagaacagccagaacagacagaaaccttgtctcaaaaaaacaaacaaaagtttatgctctctgtctcctcctatgaagaaacttgacagaagtttcaaagatattctgacatgtcaatgtaatttaagcaaatatcatgttttcttgcctaaggccatctgtctctgcctccagaaatggacactgagaagcttggaaaatggaatactactcatgagcagtgtaaagccctttctgcttttcaggtgggatggttcaattcgaagattggagggagactccatgttgggacaagcatcaattacaactttccatttctttagtttttgactattgatgagaacatgaattccagtgtttgagagccagttttcataagggtggatattgaattattattattatgcaatatgtagataagcagacataaaattacaccatgccatctcttatcgtaagtgatttgcaaaatgagagagagagaacatgcaagaatctagtctccctgcccccaaagtctcctaggattctgtgtaaaccacctggcctggacctcacaaagaccacctggctctgcctactggaagctaggattaaaggtggttgccatcttacctgctaacccaacttcttctaatgggctatccttgataagcaacttcaagtttccctccctatcagtaattgagctattaactttgatttcagtggaatctactgagtcattcatgaaaaaaagaggtttctaacttgagatactcataaaaattagggccttgtcttaggacagaggaacatcaagagaaagagaactattttgtgtaagagagagctccaggggccggggtgtgccacagggtggagctgctgtgtgaaccctgggtttggtcccagcactggagggaggggctcctcacattcaaagcccctcccattagtgtctttgattttcaacagagaacaggttaagagcatgctcttcgcaggcagtctaacccaggcgagcatcctcctccgagcatctatccccttcattctcactgcatcttttaaagggcagaaaagtcaaaacactggcatgaggatgagttaggcagtgtcgtaaagaacccaactcaaaagcctgttggtcatgaagagcagcctgggagagaggagagacttccctgtggacacagaagtgctcagtatacctagagctggaagacctggttggtctggctttaaagcccaaaagaacatcgaggagaccaccagaacaagccagtcatcctctctgtttggctagtcacccatattccagtctctttaatcccaaacctcaaaaggattaaaaaaaatgccttcgattctgtctcgagggaagatgtaagtacgccagggcctgtcctctctaactgtcctagagtcacaggctagggttctctttccctgttactactgtctcttgtttagggccacgtgagtgtggctccaacagcggggccctcagcatcatgcaagcttcaaatgcctgctgcctggctttgcccttctggaggcatttgaggaggcactgaatcgcaacctagccatgggctcaggaggagttggaggatcttgctggagatagtctggccaaagggacccgtaacgcgaaggccagcagaggcaaggagagtcaggggaccagcctgttcctcctaaagaaaaaggccgctgcagcagagacagggagaccctgtatcccgtaccatactgtgtgccctgagcctcctgagggcgccctgagcctcctgagtgcttctctgggtgatcccaaccaagccttggcgataaggagttgggaacgggaatcagcagctggcagtgcctggccttaggcctccctgacctaaatgacaagcatacaatcttacccaagatctcctggcgtcgaccattgtgtggcccatcagtgtagacccactcaaaatctgtccgtgaaccgtggttccgcatggctctgttcagacctgccccaggctctactctaggtgcagccctgtgagggtgatggtgtcggcccgaagctgttgcctgtgtctgttggtgcctacacaggctgagtaaacaacgtgagggtggcactgaacaccacccagttttcagcccagcctggtccggacccacctccagctcagcaggctgtgcttccaggtttggacgggccttcctgtaagagttccaacacttacagactgggcaccaggccaggcctgagcccgggcaaagcagtaagggaaagagcttcaagaacttgtagcttatcccctttgagggtggacgggatgtgtgggaaagccaaggctaagaatgcacacacacaaaaaaaatcagcagctaggaggaggccggcagcaccttaacaacaagctgacccatgcatcattaagttcccagagaaaacgtaaagatggaccacagaagcaacccatgagcctggagcagaccttctgtgtgtgggtgtgcacatgaatgcatgccttgctcccacccccaatttaaaaagaaaaacagctgaagaaaccaaacgtccccatgtggacatgggtaacggctgaacacagagcacatgtcatgagctgttcttcactcaacagcgctccccatacagtccaaggtgagcctgcagccaggctccaaggacaggggagtcacagcagaggactcattgtgccatgcccagtcacagccgctgaggtgttaagactatggcctggactagtcctttaagctctggaagggttgaagatagagaaaaaaacacaaatgggactgtgtcaaggccaacgtgagctgcaacagccagctcccttatcaatacatcgacggatcaagctggctcatggagaggctgaacaaaaaagtgacacaagaatcagatgcagactttctggttgtcatttataaatgctacaaaagtattcctaaggcatacaagtttgcaacaaccaatggctgtaggaactgacacaccactctataaaaattacagttatgaagtagcaatgttttttttggttgggggggtcaccacaacatgatgatctatattaaagggccacagcactaggaaggttgagaaccgctggtctaagctgatctcatgatttggttgttgacaaacgcaagtaaaaaaaaaaaaaagacactttaatagtacattggtagaagcataggtaggcagcgaagtagaaaaatctctgtatggggcccagggcagcttagccacacatatggagtccaaggcagcttggccacacagctgtcacaacaggcagaatagaaaccagtcagaaaggtagacctaaatcttagtttattataaaacaacactcggctccaggagaaaccacaagctgacaacacccaagaactggccagcatctaggggaagtccctgacatcgtaaacattccagcagttataaacatcaccagatgtcccttagcccacacagcacatgcctatcccatttcgtcaagacactcccagacaaatgtcaaccgatcagggatcctcaacctcaacctctgccatgatttaaaaaaacaaaaacaaaaaacaaaaaacctaccccacctgatctcaagactccaatctcatacagctgcatcaggcacacagagggtccaagctcgagcttgaataaaggctgtttgtttttgtatactgattcggactctggctatctttgggggactccatgatctgggtataacactctggtgtaggcttcaggtactatctgaaaacattcttagttagccattgggttggtggaagctaatgatatgtttgcacatcccagaaagacttgacctagtaattgccgtgttaggcaataggctaaataaaaatggggacaacggatgactatcaagagggttacagtaacccagaataatttggctcagaacctgcaacactccatccctcctcaatcatggaaactacaattagttagtcagccctgtagaatctttaacataggagtgactctcaccccccactcccaccctgggaacttgggttagtctctccatctccccagccccttactaggtctttcactaccaaggcttcatgtcattcttttttatttgcattgggtattttcttcctgctttcttggtcttgcttactccttcagagatcacaggccttttcataatcattcttataaaatctgtcttggggctagagagatggttaaaagcactgactgctcctgcagaggacccagttcaattcccagcgcctacatgatgactcacaaccatctgtaactctaaggaatccaacaccttcgagcctcctcaggcaccaagaaagagaagaatgggaaatacctctgctctaagcaactttatcacgcctcctccatccctgatggcagcaatgccacaaggcggtggtagacgattgaagggaccagctccccatttcggcagccataacagccgaacacgtatttgtctaaccttgtcttagtcactaaggtcagatgcctgcccctttgggcagccataacagctgaatacgtgcttttctgaccttgccttggtcaccagaggtcagatgcctgcctcatgacaaggaaccaatcagaagttagctggtggcgctatgctttacgactctgggtgtgctttatggacaggtgcacagcaatgacacacagagcatagcaaccgccctgggagggcctatgggccataacaaccagttggccaatcaacacagggcaagccctccaagcctggagccacaccaatcctgagccttgagtacccctagacactccccttatgctgccctataagatctctatgcagcccctttgagctgtcttttgtagccatccgccttggcgggtgggtgaaagacccgagctaacatggggttagctcattaaattacaataaagcctcatgcagtttgcagcaagctttcgactctgcctgtgattggggtgaccgaggtcctgggctgagaccccggaggcctgagttttccgggggtctaacagcagaacatgcatacactgtgtggagatgtattgctgcgaatggtataatggaatggccaatagctaggcaagagagagagacaggactcctgggcagagaggaagaggagatagttgaggcacccaggagcaaatggatgccaatggagcaaatcagacacatgggacagaggaaaggcaactgagcctcgcgatagagttataggttaagttataacagctagttagaaaagaagcctaagataaggccaagcttttatgttgtctccgtgttgttatttgggagctggctggagggtacagggggcaggctttgaggtttcaaaagtcacctgccactttgaattcactctctctgcttgctgtttgtaattcaagatggagtccctcagttcttagcttccagctctagtcaccgtgactgcctgcagccacactcctccaatgccataatggtagactcctttccctgtggcacagtaagccccaaattagctcttccttctataaattgtcttggtcatggttttgtttttttgtttttttatcacaacaggagaaaagtaactaggacaagtaacacatgaaagaaaggctggaaatccctccccactagggctgcttgtaagggacagagcatgcacaagacaagagcatggtctacaagggagaaaccaagtgcatgaccatgacatagaaaagttcccagtgcttgccccggtcacatctttgcttcagacctgtcccagctctctagccaacttccattctggtaactctagagctggcgtaggaagatcgtctccagtctttgacctatgtggtggttgagcggagcaccacaactcgaataggccatcacttggctgtttctagtgccggtgtgtatatctgtctacagagtgaatgcgaggcctggcttcccagatggaggtgccgctctctgagcatgtgtaggcagagtctcttccaaatgacagcagccaagtggcacgctgccacacatgaaatagactctctcccttgactacttctactgcagggttacttccaaaataaatgtggggtctggtccccagctgaaggtggctctcttttagctgatgtgggaagaattgtttaaccatcaagaaggaaattgtgtcatttgcagaaaaattagacgggagaccatcatgttaagcaaattaagatgaacaagtactgttgctggcgtttcttgtcccgccaggtcccacagtagctacagccccaaataaacacacgaatgctatatttattataaaactattggctgatggctagggcttcttattggctaactctgtcttaattattaacccatttctattaatctatttccacgtggtctggcttacctggagaatgcctggacttgttactccttttccagctataatggcatcccttcgaggtctctctctgcctacctttcccagaattctcctcatctcctagtgccacctatcgtcctgcctctattggccaatcagtgttttattcaccaaccaataagagaaacatatacacagagggacatccccccatcaggttactgttactgttactgttagggaccaagaaggggaccaatggaaggggagatagatatggataatggggcaattataaacaaagtacttttatatatgattaaaatttcacagtgaaacccatgtaatgcagaattaacacacattaataaaaatgtacagaaagccatgcagtgccacatgcctggaatcccagtactcaggagacggaggcaggaggattgaaactcagaggccaacttgatcttgaccatctctttaaaaaggaaaggatatgagcaaagatggtggagaggttttctttttaaagagttacttatttattatgtatacaatattctgcatgcatgcatacctgcaggccagaagagggcaccatatcagagggcaccagatctcattacagatggttgtgcgccaccatgtggtttccgggaattgaactcaagacctctggaagagcagtcagtgctcttaacctctgaaacatctctccagcccagtggagaggttttactatgctccatttgtctaatgtttagttagggttctaggaaatgcatattataccccatagcgtcaacctagtcagggtccctttaaatgtttaaaactaagaacactaagacacttttctcttctcttcttttcttttctttctttgtttcttttttcttttttttttttttgtattttttgagacagggtctttctacgtagctctggctgttctggaactcactgtgtagatcaggctgcccttgaactcagagatccacctgcctctgcctcctgagcacagagattcccttgtaggtattccatacacctggctaaggcacttttctgattagtggcacatcaaaggttattatattaacttatagggaggaaaagtgacattattttacatttttgccaatcttttaatgtctggcttaagagcaaatttatgaattctgtgtttatcagtgttctcagtctattatgaaatactaccatgtacaaaatatgggataaaaccttgtttcatccactatgcaattgagaaacgaagtattttcatggctatataaatggcattttatacttcattggactttatgagtgatgggctcttccattagttgctggatgaaagtgttgccatggaaacagcacagcagacttagtgtctggggtttgtggcttttagaatgtgtttgttcagagagatggctccaaaagtaaactgctactgttggctaaacagcccatgctagccccaagctctctatcctgagacctgcgcctcccacaggctgcagttgcaggcataccaccacgcccagctccaggatgtcttaacctgtctggtgactagatttacattgcacactttgacatacaaaatcttttttctttctttcttttttatcttctctttctttcttcctttttaaaagatggattcttattttactcaggctggcctcgaacttgtgatctccctccaatgtcccaagcatctggaattcaagccatcaccgccacgtcatactggcctgggtttcttttgggaatgggaagactcaggagggcttcttcgatttttatacaaattgtcacccacacattttttttttttcaaatcaggcatgtgtgtgtaaactgaggattttggcaccagacaaatgaattgatgacatgactgctccaaggtatggctaagcaggagctttttattgtaggtgtgagggagggcacagccagaggcgtctgggagaatcagactagagagagaaaacagcagactacacatggccagcacactggacttggccatgagaagagagggaagtggggaagacagaagggaccaggagagcatatggccgctgtagcagggttatgtgggaatgagagcctgcggagggaagcccatgagctggaagtgtagggtcgggagtggggtgagagcagctgagaagagccaggatgtcagtagggactgtgtagcaggaacttgtgattctgagggagccagggccagcatgctcttcagtgtgctaacagacaccagagaggcctctgtcctgagcttcttctggacctgaccgtgtgtgagtcagccttccctttcactcagcttacaaagaaaccaggtttgttctgacttggaattttagaggtctcagattttgatttgctgccctgcttggggcctgtggtgactcatcatggcaggagcacactctggagaaaaaatttatacagctcatagtcaaggaattggggtggtgagggtagaagggggttggggatctcatgattccctccaggggcagaacctgccaacctgtcactaggccccacctctcacacagtctccttgaccccaaaagcacctgcagagtatccaagcctctaccacatgaagggaaggtgtttaagatccaggctgaggcacctgggcctctaaagcacatgccagaaacagccttttctttctttccttctttcctttttaaaatacaatatacgctagctgtgacactgtatccgttctttcactcactgagcttcccggtggttttccagcaaaagtacagagaaactgtcccaatgtctccttgctctgatgaactctctgtctgccatgttttgtttattgattgccttcaggtaaacgaaactttgaaacctcttgcaccatatgggtaacagacaaggggggcaggggtaaggctagcgctctgctttggtcttctttgttttcaacagtagctttatttagatgtagcccacatagcatttgctctgcttctttgttccttcatttttaccacgctgaggagccaatctagggccttcttgccaagtaagtgtcctattacagagccacacccagtccctaagtctgtccaacactgcgggttcagtggtgtcctgactgggttttgttttgttttttgtcaaattgactcaagctagagttatctgaaaagagggaaccacagctgagaaaatgcctctgtaagactggcctgtaggctagcctgtggagcatttcattaatcagcaattgatgggggtggacgcagcccaccaggagtggggccgcctctgagcacatggttcttggctgtataagaaaacaggccgagcaagccattgacagcagcctgtttccattcttgcttccagtttcttgccttgagttcctaccctgacattcatcagccatggagtgtgaccagagagttatgaactgaaaccaagcccttcctctccaagctgtctttggtcagggtgctttatcacagcaataggaactctaactacgataagtgggtttagcacgctcacaagatggacatccatcacctgcaagtagtgctggatcttttattttttggtttttaaagacagagtttctctgtgtagccgtggctgtcctggaactcactctatagaccaggctggcctcgaactcacagagatctgcctgcctctgcctcccgagtgctgggatttaaggcgtgagccaccgcccagctagttagaaggtttcaatccttactgtgttaggaataatcaatgttgggagccatacagcttggcatgaacctttaggccaaacttggcaagccacggggttatagaactgtcttttgattataatggcttctagaagcatgagcacccaaaaggaacaacatgacccagatgccaatcctttgttccaaccacaggcccacttatgtaagcaaccctccctcatcccaccacttacctaggtaaccctccctctccccaccacccatgaactttttaccctgccaacatcctctttctatagttttctgacagtctgcttgaactaacacctggctcttggctcttctccccctcccctttaccccatactattgactatgtaagctagcctggaaaaaataaaatttgccacttgatcagaatcctgtcttgtggtcattctcttgagtctcttgtcccattcccctccctggacttcttgctctaggttgctgtcctgctttggtgaatgacaagagacagcgctcctgtaggagcaatttagagggagtctggggaactttcctggatggcagactttggaggaggacggcaggtgtgcccgagggtgtgccgtatgtaggggggtgtggagctgaagcaggaaatccatatttgtgtagaggattgataacatactatccaagggttccagggaggtaggaactggagagaaactgcccctcaattaagatggagaaggcttgagacatgaggagcagcgcagaaggctggagaacaatggtgagagtgaaaattaagaaccctaccctcaaatgtgtgcagggaaataagcttgaacccccccagcaggccccgctaggcccttgcagtggtgtacctggtcatcttgtcagtgtggtggctgaagcacgtggaggctattggctagtcttaggagggccacgaaggtaaggacagggtctgagcaggctgactaatggcgagcaggttagccccaagggtgccaggaactgcggctggcctttctgtctccttcctccctgtgctggcctttgtttggtgtccaagcctccagacttgcatacctcacagcatgtgctgaaagacaaacttgagttctttgtgtttatatccacacttcattctttattttatttacttgtgttttatttgtggttcacagaatgaactccagggccttgtccatctgagacaagcacctatccccagaccttggttttgcttttaaactttgttcacttagctattcatttataaaataattacaactactcgctagaaaggtgagagaaaggctgtaataccaggccagcacgggcttttgtgtttagattccacaggctgcagactctgccaggctaggtgaaacctttgctaccatactcagcaagcctaggccgcctaggcaactcgggggtggagccgagagagaggtggggctagagggggcggggctaacgggccgctggggtccccgcagctccgcagctccgagtcagacaaacgagcaagaggagttggggagtagagggactgcacacctgcggccgctggagcgtgagcgcgatcctaaccgtaagctccggggacagcggtgacaccccagcctgacagttgctagggctgcgtgtggctcctgcagttaaatgcgcttccccctatcctaaggctgacccgggtcgtgcagtctgtcggtcatgcctccttgtcctgcatccgacgccccccccccgaccccgggcagtcccggtgagcttcggaagcaaggggtgggcgttaggcctggcagcgtggctccttagccctctggctccctccccgacaggtgcaggtttgtcccttcggctccggctcgcggcttgcccaggcacctgccccaaccctggagggctctggcgctcagtgactccttaacttctgcactccgcacctccggcggtttaaacttcaggcggcccaaagccggggtcgccttgcccgcgctgggttggagggattgggcgggaggtggaggcaccgggtgtctgcgtgcagctcgccctagactaggaccgcgcgactttctagccttctgccgctgctggccaggacttttgagttagactttggggagggcggggttgcttgcttctctgcctctaaattcgtcgtgatcgttttttaaagccgcagtgccccagaggctagcattgttagtgtgatagtggcttccttcctccaatggaacatttcattggctgtgcctggtttggcgtagcagaaaactaaggaaaaaaaaaaaaaagcatgggcgtggtcagtaaagtttccattcccaaatacccacacgaggagggccacgtgatggcttcctgggtccctgaagaagtgtctccggtagggctgtgcttggggaccagggctggctgttcatacactgccctgggccctggggataacagggaatgtgctttcatgggacgtgcttttggacagacaacaagcaaactccaacccagcaccacaaaagaaacgagtgttttattttaaatagcaccagaagatgatgtttgctgtagacaatagacagcattaaaaagggaacagggatgccgaatggaggcaccattttaactcctgaagagttagggagccactttgtatccagatgcattaggctgaggaaagagcactaagggtcccgaggcaggagtgtatgccagtgagggcagtttatgtcctcatttgcagtctgagaggagtgaccagtgtcagagagagtgccccaagccttctgctaccccagataccaagaaaacaagacttttccctagtctcttacctgctcagaaagtcagctatgtgacccctagcaccatcagtattacttcatgttgtcctgtgtggctgcacctgccttttggctgactgtgcctaaagcacactggctgccacaaatgtaagtggtgaagagagtaggggacttttagtgaaagttgggaaagtgtgcacctccaccagacccctggggtgcccattttccgcttagtgcccaactagtgcacaagtggtatccacagaagcccttgtcactgtaaacaacattccttctcccatccacagaggtgccagcatgcccaggcctagtccctacctacctggtgcctacactcttttttcccctagtgttctggcccaggctcaagaatttgaaggacagagccacccaaattccatttcttaattcttgttctgagacctgaaaacatgggaacacagcctggttctagagaatgagggacaacagaagtcaaggacaagattagagacaagagggccactactcagtcagtcccacggggctcacctgcaggtagtcttcaggccaagctagtgatgtggccgtgtctccagccagctctgctgataagagagggaaaaagtccccaagagggagccaacctctgccaagaaccttctcctgcatggtggtagccagggagggggggagcctgggtccccagcctcattacataatctgttgcacaaacagggtcaaaggagcacttgccctgctgccaggatttattgactttcctgagggaaatcacagtttgtgctttctctctagggagcaagtgctttcactctcagagtggcctgcatgttccttcccatggtcacaggcctggagtggcatcttcactcctgacccaatgcctgccttccctttgctggccattcccattttctatggagccaagccactgcaaagccacaccctgggcactcttcccaggcctgggagcttgctttaggggggaagtgttgttccagccgtgttactaaaaaggctttacagaaaattctctagttggccaaccaacaaacaagaacccttgttactgagtaagaagtaggaatcttcactgcctttggcatttgagaggccggtgagcagtggcagagtgtgggtgtctctttgtcacttactggtcagattattgggagcaaacatcctctctgaactttaagttctctttaaaacaaggggaaatccccctttatttcttaggttatagtattatatgaagtgataattcgagagttgggctggcagcttcagcagggacacacgcagctcaacgctgtggctgtgcagcctgagacttgccttgtaaacctccagtcaagtgcagccaggatcttgacctagggtgcaaaaaagaattttagggattaatcagtttgaagcacagttggagtttattaagaaaaaaatcgtttgatatagacttagagggagagagagacaatatgactaacttaagacagtagttgtgtgacttttactggaaacacatgaacaaatgtccatccatctcagataggcaccaatgataaatcaaagaaatgactccacagaacagcttgatgaaccaatgagttgactggccttgcaggagcatgactgaggaactctttactgcagcgtgggtgactccaagatagcatcactgataagcatgggtgactcaaagatagtatcactgacaagtcccatcctgtcatgagtgacagctcctcaaaaggttcgtcaaaactgcagtaacctccctcttgtatatgctagtagccccatcctaacccaaccgaagaccctgcatagctgggagcaagaatagtggtgagtggtgaaggtgaggaactagtggccttcccacttcttctggggtgcgctaagatccccattatcctaggcctccctagcactgtgttctccctggtcacaaaggggccaggattatctctgctcctgggtggtgacagaatgactgtgctgtgcccagaggaagatgttacagtacaacagtggtccatctcacagcacaacagtggtccatctcacagcacaacagtggtccatctcacagcacaacactggtccatctcataacacaacagtggtccatctcacagtacaacagtggtccatctcataacacaacagtggtctatctcacagtacaacagtggtccatctcataacacaacagtggtccatctcataacacaacagtggtccatctcacagtacaacagtggtccatctcataacacaacagtggtccatctcataacacaacactggtccatctcacagcacaacagtggtccacctcacagtacaacagtggtctatctcacagcacaacagtggtccatctcacagtacaacagtggtccatctcacagcacaacagtggtccatctcataacacaacagtggtccatctcacagtacaacagtggtccatctcataacacaacagtggtctatctcatagtacaacagtggtccatctcacagtacaacagtggtccatctcacagtacaacagtggtgcccatctgtatgtgagtgccatttcaagagatggttctacctagttcctttggtgacttttgaagtctcccagatcaaaggatttagaagattaaatatgtcttaacatacatatttttatacaatttttttattttctatttagcaactgagattacaacgcagtttatgaggtccattgtacacctgtttgttgataagcaaggagtgttgggtgttttggggtttttaaggtcaacggaattcttactgtatgtcacaaggcagtggagacatgtgttttgactcttaagcatggttcagtcttatttgtgagggtttctcaaagggttatagtcccttgcaggtggtatgaaaatcctttgcaagagattttgcagatcctgggggtgaggggctcttttacctcagtgtccccttgtgttcgctgtctctactgcaatgtcacagtccaggttctcgatggacttcctctagactgtgggtgcctgagcacatgagccacaggagtgctgctgacatggacaccgctggctggctttagcctggcttcagtttgcattatgacctgggaaagctgtgggatcccacagccataagtcccagtggctccatggggcgtcagagagccgcaggtgaggtgcagctggtgtaaagaggacatggctgctccagggtatggttgagcaaaagtaaaagttcttttttttttttttttttagatgggagggagagtacagccagaggcatcctgggagagaaagtagtaaactaaacatggcctgctgactggacttggccatgagaggagagaaagcgagtgagcaagaggggaagacaaagagaaccaagagaaggggagagtgagtgtgagaccaagagaaggtaagaaaagagagagagagagagagagcgagcacccacacactctctcataacagaaacggcagagttctaaggacaatgagtagctgtagggaggcaagcccatgagctgcagacagatagtgtaaggaggagtgagaagagccagaatgccagcccgcgtggactctgaaatgtttaataggtcctagtggtagtgagggaacctggagaccaacatgggccttggtaggctaatgggcaccacagacagccacttgtccctttggtagagggaaagaggcttcacctgttcctgaggaatgctgacttttgtgtaacgttcagaatttggacctgacacagctaaggtttgtcttctggccaccccccccccacacacacacacctaaagcttagctctcctgcagaaagagtgactatgactgttttgaaggctggcttttaggtagtaccagaaaaaagttccagatccaagcccaaactccttgctggcagccagggttggtttctgaagtagaagtgcagctacagtcccatgctggaccctggtgagagagaagatttagaaatatactgacacccctccctgagtcatcaaatgggctaccagactgccatcttgtttgggttttgtcttgattttctttttctttgcttaagtagacttacatcaaagacaggacttggggacaaagaactctctctgccaggctccaaataagtggattatttcctctctgacaaatgagaggctctttaaaactcgaattttctttagccaagactggaaattaaaattcatctctagaacagagagcagaggcagcctgggttcccttggcccttggaaaggacaaaagagcttgcttgtctcactgtcaggttcaaaggaagctccacttccccaaattctggaggttagacaaaagccagcattcctcaggaactggtgaaacctgctcccctctaccaaaggagccatgtcccttaccactgcagaagggacaggtggctgtctgtggtgcctattagcacaccaaagtgcgcaagcgcgctgggctccaggctccctcagcatcacaagtgccaagttctcctcaccccctcccccgtgtaaactcctccagctcacaggttcccctcactcccgctcttcgtcctccttgtaactctgctattttggctatgtgtactcttggccgctttgacctcatctctcaccccccccctccaccacacacattctgctcctgcttctctcaagtctgctggccatgttcaatctaccatctttctcttctctgggctcttccagatgcctctgattgttctctccctcatatctacaatagaaaccttccccttaagcatttcatgggggagtcatgtcatccgtttacatgctccctgatttcacctatgcctttgtttcatggttttccatgagttgtaaggtgacactgagaaacttagagacccttcccctgtctgaattagaaacaaatctactttccgtgggcagtttggtcctttgttgtcgccattttgttttttcgagacagggtttctctgtgtagctctggctgtccaggaacttgctctggagaccaggctggtctcgaattcacagagatccaactgcctctgcctccctagtgctgggattaaaggcgttaggccaccaccgcccagtgtgggcagtttgtttcttaaatctttttaaaatataaggaagtcagaccccaggtttctggacctaagtgcctaggaatggcagggcagtttaaaggaatcagtttcccctgcccatttaggctcgtatactttccccgcttgcagcttgcctgtctctggcagccccactgcccaaccagcctgtacctctgagaaaacagaaccacccagaaaatggaagcccccagccccagtgaggaaggtgactgctgtcttcccacggtgcaccccacagtgggaggcctcccagtccctgccagcccctgtcctctgagagcatgtactccaggggagatgatgccctgttggggtggggcgtcttaacatcagagatgaccttgggatttttttttttctttctggtactgagaattgaacccagaacctcacaaatgctagacaagtgctctaccactggccacacccagctcccttggcacaagctttaactcctaacttgtaggcattggggactttagattctctctctctctctctctctctctctctctctctctctcagatttatttatttattatgtatacagtgttctgcctgcatgtatgtctgcaggccagagagagcaccagatctcattatagatggttgtgagtcaccatgtggttgctgggaattgaacgcaggacctctggaagagcagtctgtgctcttaacctctgcgccatctctcagccccttgaatctcattttgcaacctagacattgctataagcaaatgcaacactcttccagcccaaaatgaagcgagccagagatcagggctggaaggctggccaggcctcaggaagctctgcaggaagttcaccctgcacccaagcagccaggacagtggactggattgcgcagaaggtccaggctccaggcaatcctgttgcatgctagtgaggaagcgtccagaccatgaggttacaatcactgtggaagagctgggtggggtgtgatgggaaggaaggcattggcgtgctggatggtctaatgcctccccaccacgggcctctgccctccccgcatgagttaaccttctccacgaaagccggtgaggctgttcctctggatggtttaaagcactggaaaatgtgacagcccctgttttagttggcagagctggagatggaagacagctctggtgagactcccaggctttagcactttcacctgacaatgcccttaccttttttttttttttttcttttcaagacagggtttctgtgtgtagctttggagcctgtcctggaactagctcttgtagaccaagctggtctcgaactcacagagatccacctgcctctgcctcccaagtgctgggattaaagcatacaccaccactgcccagctgcccttacgttcttaaaggacttcaaaagctgtgtggcagcattggagaaataagtgaaaacagagctgggctacagcttagtgatagagtctgtgcctatgtgagtgaggccctggggtccaccccagcactgggaaaaattgttattgttgttgttgtgttttttgtttttatgagataggttttctctgtgtagccctggcttttctggaacactccctctgtagtccaggctggcctcaagaactcagagatccatctgcctctgcctgctgagtgctggaattaaagatgtgtgcctggcttaaaattttttttaatggagtatgtttgtttgagaagccataaaatagagtcaaggccatagttaatgagatctcagaaacaaaggttaatggaacctttgcctgagactagataaattaataatccctaattaattaacaagttcgtttgtccagcctcctcaggtttaaagcttataaacataggctgaaccaataaacttacgtggcttttccacactggaaatatccaccccctctctaaaggcattcagggctacccacccacatgggtgctcccagcctccctcgccagctcctccgtggtcagactgagggctgggcaaacacagtccctgtccttagggcacaagggcagcactgaggtctggcctccagcctggctggccctgggccctggtgtgcttcagccgagagtactttcagatcatgaattttccagccatctctgctgaacccaacgctgttcccttctttctttctcttgtgttgccttcaaaaacattccaaccttctcctgctgttgtctctggtttgtttccctgagttcagctcccagattgtgctccgagagaaacaagactttaggctccatatagcacttgcaccatagccgagccaccaaaacacagcgacagtggcactgagggagaagagcctgccacgcaccatctgcatggtctgaggaggcctctgtttgtcgatcatttcacccctcccttgtatggcaggctgactggaatgcaggagggaccaaatgcttccctttgtctcctcagggagggagataggattgcagggctagtcagtcatgaggaagccacacctcactctccctctggcctgacatctgaggagagcaggtgcatagtttccccacatctcctcagcccccacaattcccaagccaaagtgtggaggccccaggagaagcttccaggagcccaattgaccaccaggaaatctctctgagggagcattccttatgcacgccccttccaggtcaaacccagggcctgcagccaacactggcagggctatgtactttgttggttggccttagctgtggaaaacccccgagtacccaggcctataatctaccttgcaaagaccagacatgctgagtcactattagctggcccttgagcgtgattttagggatcatgcctgactgacaccaaagctactctctagtctttctccacactttgactaatcctcaatccttcaaccctccagaccagactgagaaataaactgcatgctgttgcttaaggagaatttttaatccttttcattcaaaacatctgttgtctacgttaggcagagaacttttaatttcttccagtccctgttgaataatctgataagtgccagagtttgagagttcgaaagggaactgaagacgtttgctaacagtgaggggcacactgttagccactgtatgagagctaagcaccaacagaagtgaaagagacggcagtaagcagtcccctcagagccctgggacagcagagactgctgagcacaggcgctgaacaaaaatgattggcgtatggctcaggggctggcaacagggggaggtggctcatcagaccacacaggccttgaaggccccattaaccgactttgctatcttggagtcatgggaagttccttgaggagaggctgtgtgtgtgtgtgtgtgtgtgtgtgtgtgtgtatgtgagagagagagagagagagacggagacagagagagagacagagagagagacagagagagagaggtggggtaggggagggtcagtcaggggccttgcagcagtcctggggagaccctgctggtgcctgggctgagtgtgatggcagagatagacttgatagttaggctctgcaagacaagtggtggatgtacagataagtcaatggaataaggaagtgtggccagggaatctgtgttttggaacctgacaatggccggtgggtagtggcatgtgaatggaaaccccagaagaagacaaagctcaggggacatggggacagttcagtgccacatgcgttggagattgggagacatctgagaaggcgagctggcaggcagggataaagacgcgacccacagaagtctagaataaatacacgtctcggtcatctacccagaggcgccagtggggacacatgcatgtaaacgatgccctctccacaccagttctcccgtggcctcttcccatctccttaccccatctttaccctacccccaccttgccagctttgtctacatggtttccattttcactaggctgctggccatcagattggtgcacctaggtttccaaacagaaggaagctgcacagcagtgccccagtcaccttgtcacacctgcttgagtgtgttgtacaagcctctggtgccatgaagcctcctgacactgctgaaatagattcgcagataaaggtgttcatggtttaaaaatgtaaaattaagttttacatttaatagagtagataactggtgcatttgtttaaaaaatgtttgaatggtagaaaagttagtaagtacagtgtttaatctgtggcgctgagtgtggaacgcagcatatatgatggacaagcactctgccaccaaggtgagatgcatgccagcacctaacgttaaaatatgcatgaccttaattctcatgaggactcgcttcctcgccaaattcccaataactgaccctgtcctccagttactatgttgttcttcttcaatcttatgcatctgagtgttttgcctgcatgtgcatctgtgaaccttgtgtgtgcaatgccggcagatgccaggtcccctggaactagagttacaggtgggcatgagtgctgggaatggatccccatcatctgaaagaaaagctgaaccccctccccaacccctcagctacgatgttgtagctcatgtatccagctgtggttttgctgctgttactgtttttttttttttaatgcatcttctgcctgtaggtggtggcacatatctttaatcccagcactagggaggcagaggcacctggatcattgagttcaaggccagcctaatctacaaagtgagttctaggatagccagggctgtttcgaagagaaatcctgtcttgaaaaaaccaaaaccaacctaccaaacaagcaaaaaacatcttctttactagacaagtaatcatctcttagggagaataccatgactccaagaaaaaaatacagtttcttttggtttttgtagcactaagtatcacacacacacacacacacacacacacacacacacacacacacacacacacacacacacacaccactctattcttgggctttttgaaggacaatactttccaagacaccccaccacatgaatgccttaagccaaaggcagttctggaacctgtggtgtcccacacattacctccttgctcatgataaagcagaacttataatgaggcccaatgagaggctgacaatgcctaacaactcaattgtacattgaccacactgttctgtggaacattccagcaccacctcagccaagctttggggccatcactaagtgaaatggggttacttgaacagtctctgtgataactgtgggtgctcctatgtaactaatggacacctagtgtatacgtcatggatacattgaatgaaagaacaatttacaacgtgggtggaatggaacagaacagagggagatgtcaccacttaagatcacagcttttgggttttgttgtttgcttgggatctttgggggaaggaaggaatgagaagaggtaaaaggacagctttccagaaacttaggccattaggtttagcagcaaatgccttgactcacggaactgtcttgccagcccagcacacagttttaaactaaaaattacttctaaaatttctgtctgcattttcaggctgcagtcagccatggcaaacaaaaccctgcataaggggtgacaatggggcaaggctgacatgagtcatcgtaatgcccttttgcctggattctgttttttagatggagctccaggtcactgtcactgtcactgtggttctatttgctgtctgaagtccagagtcacaattgccctgcacacacagtagaccagctgagtcattggggcggtgcaagtgtaaaaaagcagggcgggcagggactcacactcagctaccttcacctgtcccacggctctgggtgctgtaaccacagagcagtcaaagcacctgcactgagccctggtggacagcagaggacactggaataattttgcccagaaaaggaaaaggcaggcacttctgtccctaaaaaaagcaacggaggagcctttggcctttcgctgctgcagtcaagtagggggtctgattgtcaaattctctggccccctttcctgctgactcgcagctcttctgatgatgtcatacaaaattggtcttctctcagtggttccgggccagcaggtgacagtatgccaccttctcaaagaggaggactctttggtctggacagagagtctctggaaatgagggaggaaaaaagatcatgcaaattccctgtctgaattcagagggactctacttcagccatctctaatctgctttaatttaagcagttcctactatctgactgatcagtggtctggggacaagggctgagggagccttgttctggaaatggaatgatggaatgcacacggagagagaaagagagagagagagagagagagagagagagagagagagagagatgcacaaatacacacagaaatacatatacacaaagcctcctcacactaaaatggacaaagcttgctcgctggcacccaggagctcaggaagcattctcacagagacttggagccacacagatctttacagtccaaagagggagataggtgggagttggagtctgtatacacggggcgtgctttccatggatgactgtactgggatctcagcatcccggtgactctggctgtagaggctaggttgcctctcttgagatctctggcagtatctgatgtggggtgacagggaggaatggccatggaggaggctatatctgtgtggcaccggttcctggtgatgggtgaatgtgaagggagaaagagcagtgactctgagactgacggtagcactggggagatcaggagggtccctgccagacaagagcagtttgtttccgtatagattccctccccatcagggagcagatgcccctacatcagccatttctctgtggaagccccaaggctggccctcatgtggcttggtgtctctggaaatggcacctggtgttccagatctcagcttaaaggggtggctttcagcagaaataaacctggggcctcaacaaacacagatggagacctgaccatttgatattagcagatggagtgcgcaggtgtttttctaaagggcttttcctgccttgggtttgcactctgattccgtcgaccgtccagtgaaaccacctctacctttgctccaaggataggctcatgttcgtgccaagctgggcattgccctagggtgatggaagctgagaggccaggccacaatgctgggctgggacctttctgtattggtttgcaaattgcaaatagcaaatagcaagttcttctttcttcctcctaagagaaaaagacaaaggactcagactcatggttgtgcaagtacagcgtggattttctgaaatgcaatagtgtatgctcacagaaaccggagacgtagttaccaagggcccaggatggtttggggactagagaagtgacaggctcagggtgtaagatttctctttgttgggatgacaatatcctaacatcaactgtgcagatgcttacacatgtccatgagtgcactgcaaacaatgggatggtacacgtgaaatgggcacacggtaggacatgaccatcctatttcaacagaactattgaaaatacacagagatgacatgtgtaaccaaaggtgggcttcctaacactgcgcccccctttcagctgtgtgcagtgtcccaggaaccctggcctctcactttccttggtgccccataaagaaccctcctcccggccgggcggtggtggcacacgtctttaatcccagcactcaggaggcagagagaggtggatctctgtgagttcaagaccagcctggtctacaagagctagttccagacagcctccaaagccacagagaaaccctgtctaaaaaaaaaaaaaaaagaagaagaagccctggctggagagatggctcagaggttaagggcactgactgctcttccagaggtcctgagttcaattcccagcaaccacatggtggctcacaaccatctgttatgagatctggtgccctcttctggtgcgcagatagacatggaagcagaatgttgtatccataataaataaataagaaagaacttcctcccaggacaccagcccctcttttcacacatcagggtgcagagagagcccgctgagtagccttgggagcaggaggcccctcagaagccccgggcctccaaatgcagcctccacccagcaccatgctgaagctgccgtatacatttcccagggaggtgggaagttctcattactcactggagttacgagttaagtttgtctctctaacattttacaggtttctgtatcatttgtctccagcattgctggcttaaataagaaaattaccaaccagacatgatgagccatactggtaatcctgggtattaggaagcctgaggcaagagattggctgtggttcatgggcaacctagatactgtagccaaactccatctcaaacatcattgaaaccaagcaagaaccagagtttctccaaatattacaactaatttagggacagaagagcaaggcaatgagaatacaaaggtaagggctgcagagatggctcagccgttaagactaggctcacagccaaaaatataagagaatacacaggtcatagtcaattgggcccacaatagaaaagattgaaacaaagcaagttttttaaaggcaaaaataaggagtgtgggcctggcagtgtaacacaacagtgattgagctcttgcctattatacctgagactgaggattatgtacccagtgaccaaaataataataataataataataataataataataataataataacaataacagataagttaaaagttgcccagcatcagttactttgaaacagtaaccttggccactgtgactaataaggaaagtggcttcagaatgaatcagaagacattggctaaattgttgaaagacattggctaaattgttgtccttgcagaaatgcttctgtgtggggctgtggtgaccactgtgtgagcttaggctatagcagagtccttttccacagctaatatcggtcatgtagaagaattattttctcataagcatttcttgtggggatgacacaagaaaccccattttcattctggcaatatccacttctcattggacaaatgtgaacaaggccaggagtgtgtcatacattagttatttataggttgttgcaacaaaatatctgatgagaagcaacttatgcttgggctgtgcttgagggtagagtcaatcatggtaggcagacatggtggcaggaggaggtcactggtcacattgtgtcacagtcagggagcccagagagtcggtgctggtgctctgttcacttcctgcttttgttcaggctggggctctagcgtgtggaatggtaccaacctcatttagcgtagggtaggtcttcccacctcagcccagcttttctggaaacactctcgcaggcacacccggaggctcgtctcctagtgttgggacaatctgacagtcgagattaacatcgcttttggggatgtgctggggggagcctttttggtacctagagtcatggcaggcaccaggcaccaggcgccaggttctggccaggttgctcctcttgctgatgtgtcttcttcatctcccaggagtcatgtggctggaacttctcctggcctcagtgctgggccttgtcatctactggtttgtctcccgggacaaggaggaaaccttaccacttgaagatggctggtggggcccagggtcgaagccctcagccagagaagatgagagcatccgacctttcaaggtggaaacatcagatgaggagatcaaggtgagacgcccttttgtaggcaggagcaaaaaccggcaggcatccctgctggggtttctctctgatgtgggtaagagtgtgggtggaaaggaacttggggttctttagtgacccttaatctgcccagccttcatcctcaaggggggcgggcatgagtttctttgtacacaacagtcacaggaggctgtggtttccttggaccagagtcaggacatggttgaagacggagctttgggaatggactctggaggtttttttgttttggtttggttgttttgtttttgttttttttgttttgttttgttttgttttgttttgttttggttttttggtttttttgtttgtttgtttgtttgttttgttttgttttgttttttttcgagacagggtttctctgtgtggctttggagcctgtcctggcactcgctctggagaccaggctggcctcaaactcacaagagatccgcctgcctcttcctcctgagtgctgggattaaaggcgtgcgccaccaacacccagccctgtctggaggttttatctgttcactcttctctctgacctgagggcaggtgcattttgttcctaaaaggtgtttcttcctcactaaccccatctctccagctactattcctcccccacaccaggcccaggagggctgccagtggaaccaccatgtgcatccgagaccaaagaaagcttccactgccctgccccaccccactagtgggtgatgcagagtgtaagggagaaagctagcagatgcccctggtggatggggaagtcacaactgcagggggaagtagtgctcaggactatacagtcacatggagaccacaggggcagcctggggtgggctcctactgtgttggccacttctgggcttttcgtatccttccaccaagcctgcccattgtcacttgtaccggctctcagaggtgagccctggagctgagaatggtaccgcagtgggtaccattgcacacagacttggaggcagaaaggaggggccagtgggtagggggaggggaaaagaaagtcttctggaggagccagactcaagtagggtcacaagagggcagaccacacccagcccatccttcccttcaccttgtggtccttaagcagctgctgtgacaggtgctttgcagtgaatttggagaacagagatcaccccccaccccacccccctaccctaccccaccccacacagctcagcatttagcatccatccacgaaaagagagtacatccaaagatacagtgacccacacaccaggagggattaatgtcatcaggcactagcaaaaggtcacagaagttcccaggaggaagggattgagaccaggtactggaactgaagcccagagcaagcagctgaggttccttgctgctgagagctgaagctgagccctaagggttatcctggatggaggagtctaacgtttccaaacctgtttggggagcccaagagacatgacaacccctgggaataatgccacctgagccactccatgaggtaacaggcacgcccctcagctggaatgctgaacttttaaagggatccacctatttggaacctgtgtcctgagctgtcctttttatctgaattaggatcattcgaccgcaaaccctggctcaaggccaacaacttgttttctaattgccccatgtctttaaaggggcatggaaaaaaacaaacaaaaaaaataattgaagtcatgaaatgattgtatggcatttgagtttcagtcctatgtataagcttgactggagcatggcttcattgctcctgcaggggtcatccgtggccacagcctcactgctcatgcagagaaagggtagtgagcttgcatcttgcctaaaaacttgctatgtgactcttcacaaggttttccatttccagacctatacccaggtttggtgtattaagagtgagcatttgtcacactcctaagaaatgaaaagatgaccggaatggagctaaaagggagaatacctcatgggtgacctgtgcaaagccttctgtcccctccttgggcctcccaattccaccaaaacaaagatagataaaggcaatctggagtccacaggggaacccacagcctctcagggctccagtgacgacacacacggccctgtgtggcccctccatggagtccatctgcggctgcagggttcactctgagttgtggacacaagctctctctggcctctgcccacccacccccgattctcctctgcaggacttacaccacaggatcgatgggttccgggcatccccgcctttggagggcagccgcttccactatggcttcaactccagctacctgaagaaagtggtgtcctactggaggaacgagtttgactggaggaagcaggtggagaccctcaaccagtaccctcacttcaagaccaagattgaaggtgagttcccagaccaccagcctggcataggggtgtgtgagtcacaggagcagccttcctgtgtgacgtgagtgaccccgagtcagctgtgctgtagcatcccgggatcagtggaaggtcaccgagatgttgtggttcaccgtcttgccaggatgtacaaataatgccaagagtcagcaaaccatcagtgtgtgtaactggacaccagagcagaacaatgattttgcaaccagagacctgcaaagtccagttagcaatatagaagtccttgagcagtgtctatacaggaagcctggggtctggccatggcctgaatcagctcagtccctgttggagttttgggctgggcaattctatggtgtgctcagcagtcaacctatgataaactgccctgtccaagtgtagccatcaacttcatggccaagcccccccccccccacacacacactatcactcagactagccataaagacacaaatttaactcttatttccagaggggggccccaggatcattttgtctgaattagtagatccttaatagaaaacaaaattttgacaacacttgattaagcagagaatctttagcaaaattaaaccgtggtgttgatttttaacccgtttatttttattgtggtagcatacatgtaatataaaactcactggccttggtgatctttaagcgcacaggtcagtggctcggtggcaggagtgtgctgttccatggcatgaagaggatccattgttaggcagggtgtttccagaagtttgccaccatcccaaactgaaactctgcccctgtcacaccccagcccacactgctcgctctaccccagccctcacagcccaccttcctgtctctgtgaattcatctactctaaatcactcgtgcaagttgttttcccatttgtgcctggcttcttattctgtcttcatctcctctgcagcatgtcagaattttgtggttgcaggtactgagggtggagccagtgactgcagcatgcgaggccagaacgccactgctcatccctgtaccctgccctcttcctactgttcaagcttgaatattatcccatagcacgaatgaaacatcttctttatccactcacccacccaaggacaccttgggctgttgtgaataacactgaacactcactcacctcttgaagaccctgcgtatggacagccagccacagtgttgcatgcctgtaatccagcacttaagaggtgcaggcatgactgccctgcttctctccagacccagcactaccttcctgcactcactttggattcaaagactgttgtcctataggagacccaaccaaagccttttctttcacaaaggaaatggacccattaggtcgcctcaacactacagggttttaacaatgtcttcgggctggaatctggcccagtgatagtatgtgcaaggcagtgggccctgtgtctaatactaataagaattaataatgataataataactttaaatttttatgatgtaactgttacaagggactcacagataaaggccagtattgctgtctgtgcgtgcccatctcggatctgaattctgccatccttacatgagaagagcctgtgtgaatgtgtatttcctttttctaattttatagtcacatgatgcgatactaaagtttgagttaaaaataacctcataccatcctgtttagtcaaaaatcataaaaaaaaaaaaaatgggctggagagatggctcagctgttaagagcactgactgttcttccagaggtcctgagttcagttcccagcaaccacatggtggctcacagccactttgaatgagctctggtgtcctctgctggcatgcaggcagaagacataataaataaataaaatctttaaaaaatcataaaaaatatccattaaaataagcttgaagatggcattaagtttagcaatagagaaggacactgggagatactgctgagtgggaaataccatgttccaaaatagaatgagcatggcttgttggttttgttaaaaggaagatatgttctagaagtgttgtcttggaaatgtgagctaatggaagcctaagaagtcaggccctgggaaagagcctaaaaatgaggtcagattaaagccaagaaaccctgagttgcacagccccaaatgtgtggcccaatgccatacagctttaagagggagaaaatgaagctggtgtggttgtctatcatcctagcccttggaatcaaaagttgaggctcaacctggaacagtggtaacaggttactgttagacccccggaaaactcaggtatccggggtcccaggccacgactgcggtcaccccaatcaccaggcagattcgagaacttgctgcaaactgcacgaggctttattgtaatttaacgagctaaccccatgttagctcgggtctttcacccacccgccatggcgaatggctagaaaagacagttcgaacccgctgcgtacagatctttatagggcagtgtaaggggagtgtctaggggtatgcacaggttcactattggtgtgcctccaggcttggagggtttgccctgtgttgattggtcaactggttgttatgctatgtgcgtcattgctgtgtgcttgtccataaagcacacccagagtcgtaaagcatagcgccaccagctaacttctgattggttccttttcacaacgcaggcatctgacctctaagtgaccaaggcaagtttatggcaagcacgtgttcggctgttatggctgccgaaaggggagctggtcccttcagttacaaaagtgaaaaaatgctgcagtgtgacaccacagactaacaaaccttaaggatatttataatattgtcctgggtggcagatgtcattcacaaaagagcagattcttcagggttccacctgaatgcggcatctcaaacagaaactcacagaaatggactaactggcctggggagacgctaagaatgtgtggactgctgtgtaatggcgaatgagtaaattctagggactgcctgtgttttacagccatactgacagtgctgagggccaggggtgtggctcaatggcggccatttgcctagaatatgtagggcctgggatcaaacccaagaaccacaaagtgaatggatggaatttttagtgaataattgtaaaaggaaaaataaaagacccagagactgatattggggttcaagctgaaaattggaaatgcaaagcagcaggccactagctctcacctcaagctcaggctgaaagggctgatccaggcatgagctcttcacaaactgctgcctctcgtcagggtggctagagaattctgagactgagtgtcttcctattcctccttgatactgactgagccttcctatcttcaatgtggctggagaatggatgcctcatactgactccttgttcctgttttattcacctccctaatgctgggattaaaggcttgtgatcccacgtgctgaggcatctttgtgtgagctgtttctctttaggactggatcaatcttgtgtagatctgggtggccttgaactcacagagatctgtctacctcttaatcctgagtcctaggattaaaggtgtgcaccaccacctcctagcttctggttgctgggattagaggtgtgtgcctggcttctgtggcttgtgactgactttgctttctgaatcctcaggaaagctttaataaatcagaaataatatgtcacgacaaataattttgagaacttaaaaagtttagtgtgggggacgggctcagagttacgagcacttcctgctttggcagagaaccagggttctctgccacccacaggatggctcaaagccatcagtaacccagttccaggagacggagtggcctcttttgacctctgcaagcaccaggtattcatgtggcatacagacatacattcgggcaaggcatgcagaggtgtacaataaaaccttcaaagagtttagttttacaactaaatggtaagaaatgctgtagccaatacatgtagaaaacttatacattttatatctgttcatagcagaaaaaattaaatatctgtatcacaaagaaaaaaaattgctctgttggcctactcctggatgattgtgttgtgtgacttcggaagttgtccctgagaacaagtctctgcatacagagttccataaagtccttggccctgatggtgtcagccatggtttttctcccttaccttaatgtgaagtcagtatgcattctgtaggaactacaactcagtgcttgtctcaggctcgtgactgtctaggcaacactgtcacacagaccctcaccacagagaagacacgctattcttcagggagctgaggagggtgagctttcatgtttgacaggttgggtatgttgtgtgtgtgtgtgtgtgtgtgtgtgtgtgtgtgtgtgtgtgtgtgtgcacatgcgcacacgtaggagtgagcactgaacacagggcctcatgtatggtagacaagcgatatgccactgactaatacatttctgacttccaaagttttcaacttctggcaggttcatcacaatataaagctatataatggcggtagcattcatgaacgtggttgagctagtcaataccccaacatgatattcccctagatgagaagctgttggctgttggtggctgctgggggtggagaagtcatttttctttgcggttgtagcttgatggtcggttgtccatgcacatacagacagcattaactggactcaataagttagaaaaaaaggcatgagtatgagaggggaattcctgcagaggggggatactatcaggaatcatttatatatagatatgcatatggaattgttgaagagtaataaaaatacttcaatttttaaaagaacgtaaccccatgtgagtgaatatgctacgcataaaactgttggtaaaactgagctataccatggccatgacgtggtcatttaattccatggcaatgagcatctttgtacgttagatgagcacatggatggcagtcacctcacacgactctactgcagtgctctgttgagtacaacccattgttgctgggctcatgggcttctcaaagccctgatgtaagccaggctctgtcctgggcaatgggaacccggaagtgccttcccagaccatctctgccctccagagagcacactcagggtgactgggaggtcagcgaggacatgcacatagccagagcacacggtaagcaccccacagcgagactgctatgactgtcatcagtgccttggggccaccaagggcacagcactcattctcttccaggactggcacacagggaaacaaggtccccggaccccagcctccccagcaggaccctccttccctcaccctgactgtgctctgtccccagggctggacatccacttcatccacgtgaagcctccccagctgccctcaggccgcaccccaaagcccttgctgatggtgcacggctggcctggctccttctatgagttttacaagatcatcccgctgctgactgaccccaaggcccatggcctgagtgacgagcatgtgtttgaagtcatctgtccctccattcctggctatggcttctcagaggcatccagcaagaaaggtacagtgtgccagagggtggcacatcccagactgtgctctgttctcaccagtacctgctaggggcagcaccacccagacccctgtggtgtgtggctcacaaacctttcagtgtctgctgtgtcccaagggggcaggaccagacacactgccctatggcctgggtcatcctcagggtaccaaggcttcttccttctggcctcctgtgagctagctactttgtcctgagctgggaaaagaaaggtctagggaattgcacaggcacctgagcactaccgtggctcccatgtgtgatgcttactgttgtgtgctgtgcgcgctcacagtgaagctggctctggaagcaaagatgcggacgcccctaccctgaccccctatttcagactcaagcgtgttcatcttagtctgggttaggctggcccctgactgtgtaatgggaagagggaaaaacagcaagcagctaagagtattaagaacattgcgtccttggggacagctagagggcagagttcaggtgctggtatgtttattctatggcatgaaaagttcctacagtgggacactcgtccatggagagaaagctctgcactgggaattctggctgagcgcctcgccgtccctcgttgatttctgcagaatgtttggaaggtctctttattgcctgctttctcaggctggagcctccactcatctccagcctgttggatacttctaattggatgatgttttgctgttttatatgctgccacttgtagcatgaaaaataaaagacccagagacagatattggtgttgaagtttcaaggtgaagatcagaaaagcaaagcagccaagccagtagcccttacctctacctcagcacaaaccaaaggggtgatcctcagactgctcccgacttcactgctcctcagattcactcagactgctgtgccctccttaacatggctagagactaatcgcagacctttaatacctctcaaatcctgggattaaaggtatgagctctgattcactctcaggtagccagggtagtcttgaactcagaggccgtctacctcttaatcctgagtcctgggattaaaggtgtgtgcctggcttctatggctaactggtatggctgctttgctattttgatctccagtggctttaataaatcataaacaatatgtccccacagctgctgttgctactgtacttaacaaactcattcattcaaagtccaaagtactgctatcatagatgattctccagactgtacagaacaccctgtctgtccccttcatactcaggcttcaatacggtggccactgctaggatcttctacaagctgatgtcacggctgggcttccagaaattctacattcaaggcggggactggggctccctcatctgcaccaacatggcccagctggttcccaagtgagtcagtgaagtcaaacgggcacggcacagcctctccaggatctgtgggtatacagcatctacgcagggcacagggttgttcaccctaggccccttccagcaatgtctgagacttggggctcccctcatccaggtcctcgcaggcccagatgcttgtggtcccagggctgaggaaacagatcttccctcattaggtggaagagggcatgttgtccctgtcttccccttggggtaactgtggtggctgtctgaagcagaggaagaggtcagtattagaccatgctggacaagatccttaacagccctgaccagaatactctagaagttcctcctcctcctacactaccgttcacctccagctcagtggatgtccccaggggtcaggtgctaaaggagtctggctctccagtcccgtggcctgcctcttcctccccatgttctctccagtatccttcatagcagccaggctcacctgtgtccattcctctgcccgcagccacgtgaaaggcctgcacttgaacatggcttttatctcaagaagtctctacaccctgacccctctcctgggcccgcgtttcgggagatttctcggctacactgagagggatatcgagctgttgtaccccttcaaggagaaggttttctacagcatcatgagggagagtggctacctacacatccaggccaccaagccagacaccgtgggtaagctcaccagggcagggagacccagagggaattccactgcccctgagaacacagcttacagcaagaaagccctagcaagggtcacaggactctgttttccatactgggaattgaacccagggcatcacacatgctagataagtgatctgccactcagcacagctttgatcccatacctgagaggcagagctaggagagtcccacaagttttaggctagcctggtctacacagtgagttccaagccatcctgggctatatagcaagactcttaaaaataaaaaagaaggggggggaggaggagaaagaaagaaagaaagaaaaacaaagaaaagaaactaaaaattttaattcataaggaaaatgataagatgatcaaataaacaatagtttgtttaaaggtatttagaatacaaatttgttttctaatggatacagaactcattcacacccacagaatacgaggcctggtgacacacacatcccagctgctctggaggctgcagcaagaccatccaaaaagtcaaggcctcctgggtggcttagtccaagacccgatctcagagtaaacataagtaacatgtcggtgaggcagctcagtgggagattgccttgagactgttcagtccctgagtccaatccccagaatagaagaaaaattaccattggggtggaaatgatttcttcttgatagaccagaatcgtttgtattttcctggttttctatcatttacagagctggaaaatagctaaaagataagggacggtggggcttccctagaacagtggttctcagccttcctaatgccgccatcccttaatccagttcctcatgttgtggtgaccgtcaaccataaaattatcttcattgctacttcataactgcaattttgctactgttatgaatcgtgatgtaaatatctgatatacagggttatctgatatgcgacctctgtgacagggtcactcggcccccgagagggtcataccccacaggttgagaaccgctgccctaggagctctaaggacagttaggtgtcctctagatgtccctcgagtccactcagaggacacctgggaatccttttgctcatttcagagcctcccacggttcccatggcagtcgggtactcacagcaagggcagctcctgatcgtgatagcacttcataaggtcaggcttcctttccagctgtgaaacagatgttcatcatatgactagaaatgaaaacaatgcaaaagaaaaaaagccagggaagtcggtgtccagctctcgtgccttccagctgcagtctgcagaggggcttgccaaagctgtcgcttatacatgttgtaaatgcaggtcccatgtgtccagacacaggcgatggcctctttcaggacccgaatgtgtccccctcgctcctctaactaggtgtgctagggtgctgttgtccttccgactggaacctcacagcaaggactctgcattcttgctccttttgctcaacctgacttttgcgaggcttctatgttgttaccccagccatggtattcaatgctagctatgcatttgttctatgctgttaccccagccgtgatgtttagtgatggacgcagtacctggagcctcaaggatgctaagcttgtgctgctccactgacctacccctgtcccctgactggaacagtgttttagctcatggaagcattaatatttattggtaaccgattatcctatttttgacccagatacagcccagatagtctgtgaatcccacgagattataggggaatattgatctccatttgctatttgaggccactcaggccagctctccagaaatggggtgcatgggtgggcctgcttccactctgtggcacccacacacctccatcctagagtcatactctccaggaccaggcttcaatccctctctttctccttcccatccaggctgtgctctgaatgactcacccgtgggcctggctgcctacatcttagaaaagttctctacttggaccaagtcagaataccgtgacctggaggacggaggcctagagaggtgaggccccactgccctgctgtcagctctatgaaaaccaatgggaaagggcagagctgtgagggtgcactgtgtgtctctctgacacagtgctgtcagaggagcttagcagtgatgccaagctcatttttggcatggtcacattgagggacagactgtaagacatccaagtggcggtgtccgttcagagcctggatccacagaggtagagcttgggtaaatatcatacggggtcagcagggttaggaggccacttggggcttcaggtagtcacagtgaagactcagaagaccatagggctgaatcactgacgtcagcaagtgtcacagaagggatggcagcgttctgcagtagacaaccaaaacagaggcccttctataaggcagacagctaccaggtattgctggagctgtggaaagccacacccttgagtggcaacgataattcatcaccccttccctgagcgaggccttacctgatgttcccagcctcagggggcagccctttgttcttgtaaggcgtagctttcactgagcctgagcatcctgtgtgctttccaggaagttctccctggaagatctgctgactaacatcatgatctactggacaacaggaaccattgtctcctcccagcgcttctacaaggagaacatgggccagggcatcatggtccataggcatgagaggtaagtctggctgagcagggagagggggtggggtcgggaacaatttgccctttaatccaaagaaggtgtgatgtcaagataagaaggacatcagatgttctcagaatcctggtctgctgggacagaggcattgggattcgcaaggtctatacagagaccttcgggtgacagctgggaaacagactagcaaagtggatgtttagaggctcacatgacctgttccatggtcctcccgggcagacagggtccttagtgagtgaaaagtagggactgtaataggagaatagtgtaagcccttgtcactatggctccatatgacccagctgagtcctcctccggccataggagtctcctctggaaacgagaacatagcgcctcaacctcatccctttctccacacaggatgaaggtctttgtgcccactggctattctgccttcccttcagagatactgcatgctccagaaaagtgggtgaaggtcaagtaccccaagctcatctcctattcctacatggaacgtgggggccactttgctgcctttgaagagcccaagcttctagcccaggacatccgcaagttcgtgtccctggctgagctgcagtgatgtcgctagctacccacatggctttagcagcagccctggttcctcctcagtcatgctgaggggagatgactacccaggggcccagacctaaccccccacggagtcacctctctccccaaatgtttcaccccactgcacacctgtgttaagctacatggctttgatgataaatggttttatttctatgagtgtctggaccaaatgccatgtgtttcttagacagccacatggggcttcccttcaaaaagagagtttccaggtgcctctgcggcatcgtggcatcgtggagggtcctgctgggccctctgaacctggccctgctgacaaggcagagaggcaattagatgccgccagtaatcaaggtcgtgctgctctaagcagactgcagaagattacgaacaccccttgagccactcacagcacacaggccactgggaacagactttgtgtgaccagcagttgtctgtgagaaggtctgagtatcccaggcccagtcaggcctccagatgagcccagtgagatctgcaaagccgtgttggtcccatggtaatctggctgaggtagagggaaggctcacccgtgcttggctctgtgccaccagagcagggcttcctgctctgccctgaaagacctctccctgacagtatgctttacctcaggttgttccccacgggacagcagggagatgctctttgccaaaaatggctgcccagacccaagatcccactagggaaacccaagaggctgcctgatctcctgcgggttgcagcttcagactgaggaagctcccacacccagcctgggcaactcattctccaactcccactctgtcttcatatcccctccccatgaaccccagggcactgcccctcccaccttagaaggagcagacattgagcctgggtcttaccagctgggcccagtgggaactttatttaccgtctttgtcgccagtgccttcttggtgatccagaacctctgccctgacccagccagagtcccaggcaacgtgacacaagcacccagaacaatggcagggaggtgtgaacagctgctaggagactgctagagcaggagcctcctggtccccacacctcttgctgggagtccctaagtggggctacactggagctctggaacccatctggtgtccatcacagacctgactgccgcagaatagcgacaaagatgtcctcccactcctcagaggacacacgccttcctggtactatattctgggagattcccactttatttgggaagccaggctgtctgtgaagacagctgtgtgtcagctatgcctcctccccggcaccggctgagaacaagggatctccagcacccatctggcctattctcttgctgttgacagggcctcaggtgtcctcatggtggtctctggggaccttctcatgagggacttgtccaaagacagactattctgagaagagtccctgacctcaaggaggttatcatctggcaagtcccgggctgccttcctgtacttgcctataagggtagcagccatcacggctctgctgtcttggggctctaacccaagcctcccctcaggcagcttcggggactagaggagaggagacccaggaaggaaaggggtgctggcatccatccctctggagaagatgccgccgcatgagggtaatattcagaggcgtgtgtgtttgccgcccccttgtggctgtcagagcacctcacctggcacacgaatagccagtgataaagcttcatccatccatagtctccggttttggttgcactgaaggcccaattctccaggcagtgggtctaagagagggcaagtgaggagggcactacagcccagggggtgggcatccatcctacaacactccctcttgatctacagcgggggtgcgggtcttccaagatgcccaacacatacgtgaaaccgccacaaagccttcaagctaccacttaccgaacactgtggctggaactggcatggtgtgtgatgccactgtgaatgtgacaggggtttctttttcctttttcatagatctatggaacaaagatttgatcctccggggtctcggcatttgacatttttttttttttttttttgctcaaatgtcaaggacactaaattttcacttgatgcgattgcttccaagtccctctttggcattctgaacgccacgcagttccccttgcccaccggggacaccgttaggctaaataatgtcacctggccctaagcactgaccactgatctggttaactatactgagaccagtgagtaagggtgaggaagccaacacagagtggatgcatggggacacgggtcacacgggacacaatgcatgaggacatgggtcacacgggggacacaatgcatggggacacgggtcacacagggacacaatgcatggggacacaggtcacacgggggacacaatgcatgaggacacaggtcacacgggggacacaatgcatggggacatgggtcacatgggacacaatgcatggggacacgggtcacacggggacacaatgcatgaggacacgagtcacatgggacacaatgcatgaggacacaggtcacacgggacacaatgcatggggacacgggtcacacgggacacaatgcatgaggacacgagtcacacgggacacaatgcatggggacacaggtcacacgggggacacaatgcatgaggacatgggtcacacaggggacaatgcatggggacacgggtcacatggggacacaatgcatgaggacacaggtcacacgggggacacaatgcatgaggacacgagtcacacgggacacaatgcatggggacacaggtcacacaggggacacaatgcatgaggacatgggtcacacggggggacacaatgcatgaggacacgggtcacacgggggacaatgcatggggacacgggtcacatggggacacaatgcatgaggacacaggtcacacgggggacacatgcatggggacacgggtcacacgggggacacaacgcatgaggacacaggtcacacgggacacatgcatggggacacgggtcacacgggggacacaatgcatggggacacaggtcacacgggacacaatgcatgaggacacgggtcacaggggacacaatgcgcaggaacagaactatctactgagaatgacttgtgagtgcactgactatgcttacaggaccctaaaggaggctggagagatgactcaaccgttaagagcactggctgctcctccagaggacctgggttccatccccaactcccacatggcagctcacaaaccatctgtaactctcgttcctggggacctgacgccctcttctagcctcaatgggcaccatgcacacatgtgctgcacagccacacatatgagcaaaacccttatacagaaaggaggaggcggaagaagaagacttaaaagaccctgtcaaacactcacagctgatataaacactttcagtaaagcacaggacacaaagcatcgtatcaagcctgtagcttttctatgtgctggtaacaaactcattgagaaagaaatcagacccactcaccataacttttaaaaagtaaaatatcggggctggagagatggctcggcagttaagagcattggctgctcctccagggcttcaaattcccaacatctgcataaatgactcaaccacctgtaactccagttccaggaggtccagtgcctgttccagcctctgtgggcaccagtatgcactctgtgcacagacatacgtgcaggcaaacaccatatacattaaaaaataacatttcaaagttaataaaaacaaaacaggaataactgtagcaaagagagtaaaagatccctacaggcaactttaagactctgaaaaagagatagaagacactagaaaatgggaaggtcgccactgctcatgagtaggcagagttaatattgtgaagatgtacatgttactgaaagtgacctatagattgaactccgtacccatcaaaatcccaacaacatgcttcagaaatcataaaaaaatcaactcaaaaatcataacatttgtctggaagcacaaacaactccaagtagccaaagccgagagagaaacgctggaaataccatagtgcctggcctcaaattagtgtcaagaatgtcttgaaagacatgtagaccaatggacagcagcagaggacacagacaataacaacgacaatcacctaattattgacccaggtgtcaaaaacgccgtgatagaggctccgcaaatggcaaggagggaactggattctcaagtgtggaagaagaaagctagagccacatggctcaccctgcacacaaatccactcagactggtgatggggaatgtacgatgtatgtttatcttattgatagttaaataaaatactgtttggccaatgagacagcaagttagacaggactaggagtcaaagaggattctgggaaatatagtagagaagtgatgatccaggcaggaagtgacatagtaaggagactcatatttaaggaaaggagaaacaggaagtgccctctttcccctctgctcctgctcctgcggcacaatgtgatccactgacaaggagggatgccaataaggcatccgataagataagtcttataaaatatatagatgtatgataattgagactgagctaacagatgagaatcctagtcattggccaagcagcattgaacctaatacaagtttctgtgtattcatttgggcctaactcaggcaggcagctggcgtaaagctcacacgtggcagtggggctcaggcagcttttggcagaaagatttatcataatagactggatcaaagacctgcatgtaagaccggtggcgtctctgaaactactagtgggaaaaaaatcaagaaaacaattgaaggtatggtatagacactacagacaggggctttctgggaaggactcaaataggccaggaaatactttcaagaattcaccaatcgactacatgacattaaaaaccttcttgtgctgggcgttggtggtgcacgcctttaatcccagcactcgagaggcagaggcaggtgaatctctgcgagtttgaggccagcctggtctccagagtgagttccaggacacccttcaaagttacagagaaactctgtctcaggggggaaaaaatgcttttttttttcttttctccctagttttctcatatgaaagaaaacgtgtaatacttgtgatggtttgtgtgagaaatcgccccagtaatctcgggcatttgaatacttaatgggctcccagttggtggcactgtctggggagggttaggacatgaggctttgctgaggacatgttttgcgagtttaagcccttgcctacttctattttggcctctctgcgtcacacttgtggttgaggatgtggggtctctgtgtcctctcctgccacaagcccaacacttgctgcaatgctcccaccgccacgacgaactcatccctctggaaccatggctcaaataaattcttctatatgtttcttgatcatggtgtttcatcacggcgacagaaaagcaactaaatcacttgtcttagttgtcatagtgtcggactttttggcttagatgatgacctcaacttctatccatttccctgcaaacattctcctttatagctgagtaaaaaaacgcctttgtgcacacatgccccattttcttcatccactcatctgttaggggtttctaggctggttctaggcttgtgagaattccgaggtcagcatggatgtgcagggggtcttggtgctgttttgacttatattcctccaggcttatatccagtgctatgtctgggtcgtatggtagttctaactttggtttcttaaggaacctccacactgatgtccatagtggctgcattaatccacattcctaccagcactgtatacagattcctcacttggattggttactttcagatattttggtagcagctattttgaccagaatggcaatgcattccttaatagcaaatattgggcatttcccctcctgtttgttggccatttgttcctcttttgagacgtgtctgttcaaagcactggcccccttagaaattggattttttgtgcttctgttttttttattctttgtattttctacatattaattttctgtcacatgaaacactagcaaaagctttctctactctgaggtcgttgcttggctctgcagttcagagcagcaatgtggcgccatcccgcccgtcagttgttcctgggcgatatacagttccacaacttgtgaatctgtttgcatcctttgttatcacacccttgaaacccaacctgcaggaggtcagtgccggctgctgctccgggctaatctagaacagcatttactacctgctgtaaaactggcagatgtggaactaacatgctgaagtcaaacctgccttgtagtctgagatcatgagtctcaaggtcccatccttgagtccttgagcaatgtactaatagtcttatcttaattagagtgtaagagaacaatttaaatctcactttacatctgttactttgttctctgccgtagcttcacttggtcttattggaagataatagggtccaagaaactttaccctggggcagcctaaaactgaagaaagtattagaatgttctacgtgtagccatgcttacacactcatgatagagctccttataattagacccagtagggattagaaacaataactaataatccagttgaatgttagcagccatctgcctcctgtccgttgttgctagcgtcaccggacctgagctatggagatgtcataaatgaaatcaggacacttccctgccgtattgtgacagctaagcaccgctaagtaactaacccggcatctagcacatacagttttgatgccgtgggctaaggcgtggcttatgaagtcgttgagatggagtggggacaatgggagttgtcaccatgccactcagagtggcacaaggttttaaatgattaattattgctgaaatttcaatataaggttttcaagttgcagtttccccacacaaaaccaaaactccaccgagagagagagagagagagagagagagagagagagagagactgctgggcagagttggcatgggctgtcctaacactctgtattggagtcccttcctttagagggaggtccagcaatgatctcttggcactcacttggtctctgggtcattgtggttcagtttgctgtatgaagtccagagtcgtaattgccctgtgctcacagcagattagctgagtcattggggctgtgcaagtatacaaagagagagtggggagggactcatactcactctgcactgcctctcccaaaggctctggatgctacagtgtgcagagtgccatagatctgatgcttgaagactgctcaaggagctagcattgagccctggtggacagcagaacgtgctgggataatcctgtccaggaaaagaaagcaggcgcttctacccccaaggaaagtaacagcgcattttggcctctccctgctgcagtcaggtagggggctgattgtcaagttccctggacaagtcagtcatctttcctgttgcccccgcttgctgctctcctgatgacatcgtgcaaaattgttctcatttgcttctgttcagctgggtgtggtgcagggagctagggtctgtgacagaagccaagatgggtacacgctcaccttctaggtctgttgtgactttagcctcaggctgggtgaactgttcatacctgccctgttgtcagagcacttattcctggtgttcccacagtccctacacttagcctaccttcaatggcaggagacacctgacacattgtgcaccttctcggagaataaggtttctgtcagggagaaggtgtctttggattaaaaagaaaaagaaaaaaggaaaaaagaaagaaacctgtacaaccttccttccttccttccttccttttcccaatcttttcttagtcccctaaagtcagaggggccctgtctgtggccattcctgacctgttttaattcaagcaatgctagtctcaccacctgactgatagtgatcattgacaaggcacctagggacaggcatccagggtatggaaaggaaaccttcagcctgacaggcaggggatgggccctccctccccagcatccccatgccgccccccggtggggatgggcaaagcttgcttctggtactctgagactccacaaacttgtcacagagactctgagccacacagaaccgaagagctaaatgtgtggggagctcaagtttgtgttcacagggtgtgacttctaaagacagctggagtgagggctaagtgaacctgtgggtctagctaatggggattgggttgactctggagatcagtgacggtatctgatgcaggatctgatcagagaggagctggccatggaggggcctgaatctgtgcagcagcagaacctagtgatggatgagtgtcaaggaagaaataggtgactccaggcccgatgctgggcctggggaggttggttgtaatatcatgccaaacatagttagtttccatgtgtgagttcccatacaccaagggaagcaggtgcccggtacctagctagccacagtgctgcagaagccatagtgctagccctctgcacagcaatatatttaggaagggcacccacttgctcgattaccagatttaagggattcttggtagaagcatcctggggcccctaccaacaccctgaaagagcctgacacacaggcagagagggtgctttcctgccccgatttctgctgcctacagttgtttcatctatgcactgtctggtcctatgttgtgtcttatgaagcctcctctgctgctgtcctgagggcactgttcatgttccagccaacttcttccaacacagccatgccggttgctccctgggaaaagggaagcagaggagccaggccacagtctgggctgagtcttcctcatactggtttgcagaggccaagttattttcctcctctctgaggacaaaaatgcacaggaatcaaacagatggggattagcacataactggattgttgagtttcaacaggccatgaatagccgcagaactcgagaagtggttgcactgggcccgggggagggtggccgagagaaaccaggaagggtatgtgcactctatttcaataaagctgtaggaaatgcacagagaggatgtgggtggccaaacatgagcttcctgatctgttattgccaactggactccattctcccggacagaaactttgacctcttgcttccctttgcgtatcacaaggtcagccctctacagagacagagcaagaaacccagtcagctctagtctgagacccaggccctgctgtcaggcccactcagtgagaagtccctcacctcccagggatctgggtgtacagaaagcctccctggacaattcaggaaccaaagactcctcaaaggccccaggcctcagaactcatgtaccccaagggcacatccagggctgtgccaaagtcaccaggctcatttccccagaatagttcatggtttttatgacatagtgttcgtttggtggattttcctgtcttgttgggttccaagttttctatacgtaattttaggattgttgacctaaatataaaaatcatcagccaaacatatggtccatgtccactgtcctgggtcctagggagactgaggcaggaaggtggctggagctccagggtttgtggccagcctgaggatcacagtcagagccctcatcaagagaatttaaaaacaaaacaaaacaaaaaaaaacaaaacagagtctccgcaggctactatttgtttaaaacagtggagcacagcaccaggaacacataaatcacaaaccatgcacatagccaaagatgctggaacgaagagatgtttttaaagacagaataaggaatgtgggactgagaaaacagcagacgagttctgggcgagtgaggttaagaatgtggattgtagccacagcaattaaacaaaacaataaaaaaatagaagaaactaaaagagacaccacccttggccacgtgatctgtaaggacagtggcctcagtctgagattgagtgcacggttacagtactaacacctcgaagaagcactcctatgtaaggctgtggtggccaagtgcaagcccagagtgtgcctgtcttttgtgacagctactgtcaaataatcaagcagaagaaccttcctcacaaactcgggggttcttgtaggaaacacacagctgagacaaaaaaacatggctttcagccaggtgacggtgatgcatgccttaatcccagcactcgggagactgaggcaggcagatctctgtgagtgcaatgccggcctggtgtacagagtgagttccaagacagccacagctacacagagaaggcctgtctcgaaacaaggagaaaaaggagaaggaggaggaggaggaagaggaggaggaggaggaggtggtggaggaggaggaggaaggaggaggaggaggaggaggaggaggaggaggaggaggaggaggaggaggaggagaagaagaagaagaagaagaagaagaagaagaagaagaagaagaagaagaagaagaagaagaagaagaagaagaagaagaagaagaagcatggctttcattctgtcatctctgacatttttcttatgggacaaacatgaataaagtcaggagtctatggagcaagtgcctgggaagagcccttggcaactcgtatctctggcctgccaggcaccaagtcctggctaagtcagtcctcttgccccttcatcttctaacggaaatttacccaacccgaccagaaattcaaccagcacccagagacaaacagaaaaactccttttttaaaagtgcacattggtctgctaatgctggaggaattcagccttgaaacaaatttgtcacattgtatataggatgttgtaatgtaatcttacacacgctctcatctgcaggtggcctttaaggtcctgccccacttaatatatttcagcaattagacaagtgttgaagaaactgaaggcttttggttatctctctgctgcctttttttttttttttttttttggcaattgagctgatcggcaagcctgaggaacaaacatggtttctgctgccttaaaccagacttgagcaacattcaaggtcattacttcaaggcagttgtcaagtgtttgctcccttctgatgagaggaggagcccctggtgagcaagttttaacacagcttcaacatgcctaagttccaactaattcacaactgtaacagtttctaggaggaacagatggtgaggtgtcttatagttaggttccagtaacactgaggcagggccttcagttcacattatttctctgtaacttaacgcttcctaggcaagcctattagtgaatccctttttgttgcatttaattgatgttaaggcttgtcatttctcttctcccattcaatcccccaggagtcatgtggctggaacttctcctggcctcagtgctgggccttgtcatctactggtttgtctcccgggacaaggaggaaaccttaccacttgaagatggctggtggggcccagggtcgaagccctcagccagagaagatgagagcatccgacctttcaaggtggaaacatcagatgaggagatcaaggtgagatgcccttttgtaggcaggagcaaaaaccagcaggcatccctgctggggtttctctctgatgtgggtaagagtgtgggtggaaaggaacttggggtcctttagtgacccttaatctgcccagccttcatcctcaagcaagatacagactgcccccgagaaaggcgtctgtctgctcagtgccatccatcctgtgcctaacctgaggccaggatgtgtcaggaagactgcaggggggggggggtgagggggggtgaggggagggtgaggtcgggggggggcgtgggtatcttcatacaccacaggcacaggaggctgccacattcagctccccttgacccacctaagggatggagcttgagatgtcttgaagggaaaagtgagccgatgcccctgatttcatgtggcagtcacacctatagaaggaggtgatgccccagcatggagatcacagggtcagcctcaggtcagccttaggtgggcctttcctgtgcattaggtactcctgggcccaccatgatttttatcaagctgccccgtggggctcacagaggatagaataaaagctgaaaacggcatggccatgggtcccaggagattttgtgaacatcaaaatggctagaaatcagctgcaactccaaggccatttccacgcaaccccaaagtcacaataagcctcctggaagagcctggacggagcagggcccaaaggggaagcactagcatggtccggaggtctctgggaatggcggcacctgagctgtcccataacctgaaatgagcatgcccggatggttgctggactgttcctctcattcacatcaggactcttggagcttgtcttctaggcaatccatctttttctcactgggttggggtgagtcatacaactgttagcaagtgttggcacatcttggctcacaggccaaatgtggcttaggactttttcttgcactggcccctgtcaagaatgactttttaccttggtcagtgtggacaaaagccaaaggaaaactaataattggaagtgcgcaatgattgtgtggcatttgagcttcagtcatatatgtaagtttggtggaatgcagcctcactgctcccacaggggtcatccgtggtcacagcctcactgctcctgcaggggtcatccatggtcacagcctcactactcctgctagggccatctgtggcagctcctttgatgcagggagaaagtgaaaagactgaatcttgaaagcctaataatcttactctgtggctcctgacaaagtttaccgactcctactctacagagggcttggtgaattaagagtgttggagttggttagaggtgatgcaagcctttaatcccagcacttgggagtcagaggcaggcagaattctgagttcaaggccagcctggtctacagagtatgttctagaacagccaagtctacagagaaaccctgtctcaaaaaaaaaaaaaaaaaaaagtgagtattgttcacactcctaagaaatgaaaagatgaccggaatggagctaaaagggagaatacctcatgggtgacctgtgcaaagccttctgtcccctccttgagcctcccaattccaccaaaacaaagatagataaaggcaatctggagtccataggggaacccacagcctctcagggctccagtgacgacacacacggccctgtgtggcccctccgtggagtccatctgcggctgcagggttcactctgagttgtggacacaagctctctcccgcctctgcccacccacccccgattctcctctgcaggacttacaccacaggatcgatgggttccgggcatccccgcctttggagggcagccgcttccactatggcttcaactccagctacctgaagaaagtggtgtcctactggaggaacgagtttgactggaggaagcaggtggagaccctcaaccagtaccctcacttcaagaccaagattgaaggtgagttcccagaccaccagcctggcataggggtgtgtgagtcacaggagcagccttcctgtgtgacgtgagtgaccccgagtcagctgtgctgtagcatcccgggatcagtggaagctcaccgagatgtgcttgaaagtttttgaattgttttcctcattgctctaacataaaacctgacaaagacaacttaagcatcagtgggtttattttggctcctggtttgagggtacagtccatcatgacagggaagccactgcagagggaggggggtgatgtcatattggatcagtagtccagaagcagcagaaaggaatgtgattgtctcattttctccttccttccatgttttagtcagtcttttgatcacccacgccgcccgtattcaggacaggtcttcttgcttctcttaagtctctatggaaacaacctcacacatctccgaggtgatccccaaaccaaccaagttggcaataaagatcacagatgtaaccccagaaatgtggagtcagggggtggagatccttgggggctcccagcccaggcaaaacaacttggttccacttttaagagagtggttgaccctctcttaaaagagtaaagcagaatattagagaaggactcctggtgtcctcccctggaagaaacacacacacacacacacacacacacacacacacacaccagcttaaggaaggaagggtttatttcagctaacagttcaagggtgctggccatcatggtgacatcatggtgggagaaggctgaagcagctggtcaccctgcatctgcagccaggaagcacagagcaatgaatccctgtgcttagctggctttcttcttctgagtcaatccagtcagccaggccatgggcttgtgctgcccacatttacgatgggtggtcccaccttaattaacctagtctacataatccctcatggagactcctctcctacatgactctccatcaagtcacaagtcagagcagctgtcacaaaccttaaagacaatcaggtgtggaaacacttcagaaagccagagccactgtgtaaacttcaagttcacattctctgtgacaaaatacacagaccctgatgttagaacaagagccccgtagaggaggaaacaggacaggcaatacccaggatggcactaagcaatatttccctttgggggagaggaggtggcaagcttgggagctcagcctcaactcactgtctccctagtaaccgtagttactagagtgttacagcacaaggcctcctcggggtacaaatgatcaaaaaggacagttccagctttgagttcaccttggacagtaacccactaagaccaccctgtgtgatctagcgggactggcagcctgtgctgggcctggtgttgcaggatgttctgctgggccagggtttgtggttctctgcatcagccacggtgctatttggtggccttggtccccaggcgcaacaagtctccagctagattcctttcccgtgctccccagtataggtttggtccaataaggctcctacctcatatttgttgccatactcctgcctcataatggacttttccaggtccctctttcccccaaactctgacacctggttcactgattgattttagcccgactttttgtaaaagctggatcacaccacagatatgacatggtagtgaactcttctgtacgttagatgagcacacggattgcaattacttcacagtactgcagtgctctgctgagtgcaacccacggtttcggggcccatgggcttctcaaagccccgatgtcttctcagtgaacaagtgcttaggaagccctgctgtaagccaggctctgtcctgggccatgggaacccggaagtgccttcccaagtttttgggcacttcccaagtgccctccagagagcacactcagggtgactgggaggtcagcgaggacatgcacatagccagagcacacggtaagcaccccacagcgagacttgctatgactgtcatcagtgccttggggccaccaagggcacagcacttattctcttccaggactggcacacagggaaacaaggtccccagaccccagcctccccagcaggaccctccttccctcaccctgactgtgctctgtccccagggctggacatccacttcatccacgtgaagcctccccagctgccctcaggccacaccccaaagcccttgctgatggtgcacggctggcctggctccttctatgagttttacaagatcatcccgctgctgactgaccccaaggccaatggcctgagtgacgagcatgtgtttgaagtcatctgtccctccattcctggctatggcttctcagaggcatccagcaagaaaggtacagtgtgccagagggtggcacttcccagactgtgcctcctatggccaagatgccaccatgatgaaacaaggtagctagacagttgggggaaaaaaagagtccgagggacattttagtttccatatggccagttctttaggagcatgagtcaaggggacaaatgaagctgcctagcactgctcaggcctggactctcatacttgctgctcgggcgagggccagctccatacctgggccatgccctgatctaggccagcatggctaatagagcccttgtgctgtgtctagccaagctctgcacctacctgcctgctggcacagtagcagctatggaatcacggccctgctctgaggaaggcagctctcaccacctttccctgtgtgggggacacttccttgcagctctaagattccttctagacttctgtgcagctctgttgtcccagcttggagggaggcaggtctggagaacttcacaggcacctgagtgctccaaaggcatggtcatgactcccctgtctgtccccttcacactcaggcttcaatacggtggccactgctaggatcttctacaagctgatgtcgaggctgggcttccagaaattctacattcaaggcggggactggggctccctcatctgcaccaacatggcccagctggttcccaagtgagtcaatgaagtcaaatgggcatggcacagcctctccaggatctgtgtgtatacagcatctacgcaggacacagggttgttcaccctaggcagagttagacttggagctccctctaagccaagtcctccatggtgacccagggcagaagagggacttctctcccaccaacatctgagaatggaacacaccggccccaccctcctcctgggataacacaagcatggtggcctgtggactggcacctaggcaaagcccagggagcagagatacaagcaacgtcatggatgtccaaccttctgacactgaaatcggatattagctacaatggactaagtggcattcagacttttcctagtacacatgaggccccacgggtggcaggatggacacacttgatagactttcatggtggtcagaactctttagaaactgtcctttcctgtccctcacctccaagtccctggattcccaatgggacagattgctgaaggaggctggcttgcgctcttcagttctgtggcctgtccctgtcctcctctgtcttctctcctatgtccttcgtagcagtcaagctcacctgtgcccatttctctgcccacagccacgtgaaaggcctgcacttgaatgtagctttcattacaaaaaacatctacaccccgacccctctcctgggcccgcgtttcgggagatttctcggctacactgagagagatatcgagctgttgtaccccttcaaggagaaggttttctacagcatcatgagagagagtggctacctacacatccaggccaccaagccagacaccgtgggtacgtatactcatgagaggcaaatcccggggcttggggcaggggctgaaaagctggaagtttcccaaccagtatcaagtgagcagatcccagcacatttaatttgtttagtcacggggaaccagtaaaatgttaacagccgcaaaggcagataagtgcacaaaccagttttccttcttacctttttggtttttcaagacaaagtttctctgggtagctctggttgtcctggaattcactcggtaaccaggctggctttgaatccagaaatctgcctgcccctgggtgctgggattctttaatcccatgtgccaccgctgcctggtttacaaaccagttttttaataataaagatcactgggaacgcatttgtccactctacagacaggagtcgtctgcactgttctggcttttctgtgcttcgctgagccatgaggtggctcagtaataagggtggatggaaccccaaaggcagtgggtctcaccctgtgggtgcagcctctttgccaaatctctgtctccaacaactacttacattacaattagccgggcagtggtggctcacgcctttaatcccagcactcaagggaggcagaggcaggaggatttctgtgagttctagaccagcctggtctacaagagctagttccaggacagcctccaaagccacagagaaaccctgtctcaaaaaataaataaacaaacaaataaataaataaaattagtaacggtagcaaaatcgcagttacaaagtaacaaagaaaacagtttatggttggaggtcaccacagcttgaggaactgtattaaggggtcagagcattaagaaggttgagaaccactgccctaaaggattgacggactggtagggccctctggatgtttctctagtcctcttaaaaacacctgagaattattggacccatttctgagcataccacagttcctgtgacagtacaacattgcagatactcacgtgagctatggtcagagccctgtgttttggtttggtctggggcttttggctgttttgtttgttcagggtctatgattttgtctttggttggattggtgtaaggatcgatgaagagcctcgtgcatagtcagcaggtgtcgaatctctgggctctgccccaaagtcctgaagttttaatccctggaatgtatttatctcagccatgtaccaatgtttataattgattttcctcttaggtacttttaggttgtttttcttttccttccttccttcttcctttcttttttttttaagattttatttatttattatgtatacaacattttgcttccaagagggcaccagatctcataacggatggttgtgagccaccatctggtttctgggaattgaactcaggacctctggaagagcagtcagtgctcttaacctctgagccgtctctccagcccctttcttccttttgtgtgtgtgtgtgtgtgtgtgtgtgtgtgtggtgtgtgtgtgtgtgtgtgtgtgtgagtgtgtgtgtgtgtgtgtgtgtgtgtgagtgtgtgtgtgtgtgtgtgtgtctgcctgagtgtattgtatgcatcatttgtgtaggagacctctgaggtcataaacaggcttctaattcccctgggactggagtaacaggcagttgtgagctccttgtgggggctgggacctgaacccaggtcttctgcagttagtgctctaacccactgagccatgtctcctgttcctcattttaagtatcggtatatatagacccaagttctcatctttatagaaacggcatatgaatggctgagttttacagcacttgcatagttcaaggctcagtgccgcataaagtgtgcgtgtgtgtgcgtgtgtgtgtgtgtgtgtgtgtgtgtgtgtgtgtgtgtgtggtgtggtgtgtagtatgtgtgtgctgtgtggtatgtttgtggtgtgtatgtgtggtgtgggggagtgtggagaggattggggggtgcctctatatggtgtgtgtgtggtatgtgtgcgcatgtgtggtgtgtggtgggggttgtggtatgtgtgtggtgtaggtgtgatgtgagtgtggtgtgtggcatgtgtgcatgtgtggtgtggtatgtatgtgtggtgtggtgtgtatgtgtgtgtctctgtgtatgtggtgtgtgtgtgtctctgtgtgtgtgtctctctgtgtgtgtgtgtatgtgtgtgtgtatgtatgtggtgtgtgtgtctctgtgagtgtgtgtgtgagtgtgtgtgtgtgtgtgtgtgtgtgtgtctctgtgtgtgtgatgtgtgtgtgtgtgtgtatgtgtgtctctgtgtgtgtggtgtgtgtgtgtttgtgtggtgtgtgtgtgtgtgtgtgtgtgtgtaagacactgccttagagtgagtgagtcccatgagatcatggataggattggacccattaccagatggtgttaccagggctccgtccggatgtggggcaccgggcaggactgtgctggagacagggcttctgcctggcccatcgctgagccagccccacacctccgtcctctccgggaccaggcttcaatcccccctttctccttcccatccaggctgtgccctgaacgactcgcctgtgggcctggctgcctacatcttagaaaagttttccacctggaccaatcaggaataccgtgacctggaggatggaggcctggagaggtgaggcccccaccctgctgcaaggccccaggccccaggccctgcctctccctgcccaccattcatccctgatcaaggcatctatagggggacagcaagctcctctgtctttgtcctacacatcctgccaccccacctgagaccaggggaccctgtgtggagggtgaagaggtggaggcacccacaggacaaatgtcttgttctgtaggattcagaactcagcagctccccctacaggcaaggagtctccaggactgtgagcaaccttgactgcaaaataacaggacctctgagccagggcttctacagactgtaggttagattctgtgggtgctaattaagagaggactgtggaaaagagtggggaaccagcccatctccagagttctgaaagctgcacatgtacagggccttagtcctgttcctaagtctgatgcaggttttgctctggcccagagtccccagggtctatgcctttctttcactgttcagtgacacacaaagcaccaatcccagagctgtgggcaggaagagaaaatgaaatgggacaggatctgcccctgggtgctggcatgtgaaaccctgtctcaaaaaacaaaacaaaacaaaaatcatcacattgattgacatgctgccaaagtaagggacccatgttttctactgtgcttgaatggtgccccatgtcttccaagtatcattcattctgtttttaccagaggacaaactgagacgcaggcatggcaaacagttgccagagtcccggggctctttagtactacggtcaagacgagcacccggatcccttgactcttggtttgtctcctctagccagtttgtgtgctggctcctgaggaatacccaggagacaaggagtttcaaatcccttggaccctaagagagggaattcattactctgagaaacctgggatcttgaactggggtgggagaatgctcactggagggtaggcttgctagcagagacctggaaagcccaggaggaaggtaaaggtaggagctgtggcaggcacctctagactcaaaactcctgggtgcacaggtgccacctggtggtgagacagaggtgatggctgctgcttcccatggagatgaggtacagagatgaattcatgaatgaaagctggtgaggagcttagaacttgctgcctgccttgatgagcactctacactagcgatccacctagaaatggagggccttgatccagtggacctatgggaggaaatgacaccagtcatttgaggaaagccaggcaggggccttagcactgagcctgagtatcctgtgcgctttccaggaagttctccctggaagacctgctgactaacatcatgatctactggacaacaggaaccattgtctcctcccagcgcttctacaaggagaacatgggccagggcatcatggtccataggcatgaagggtaagcctgtctgagcagggagagggggtggggtcgggaacaatttgccctttaatccaaagaaggtgtgatgtcaagataagaaggacatcagatgttctcagaatcctggtctgctgggacagaggcattgggatttgcaaggtctatacagagaccctcgggtgacaactgggaaacagactagaaaagtgggtgtttagaggctcacatgacctgttccatggtcctcccgggcagacagggtccttagtgagtagaaacaggctgtagtggaatggctggttcctgagtctgcccttgtcattaccgttccacatggcctgcctcagtcctgaggcccttgtcctgctttggggacatgacagcagaacttaatcctcagcaactggtcttccccacaggatgaaggtctttgtgcccactggctttgcggccttcccttgtgagctactgcacactccagaaaagtgggtgaaggtcaagtaccccaagctcatctcctattcctacatggaacgtgggggccactttgctgcctttgaagagcccaagcttctggcccaggacatccgcaagttcgtgtccctggcagagaggcagtgacaccctccgggatcaaccacaccctcagcaatagccctggcacctccccagtctcccttcagtgagatgccccctttctgaggagtgagcttaaagttttgtgccctgcaggctctgggagcctgggtacacacctccacctctcaccacccctatgttaggtcacagaccttaaaacccacagccacttggggggctggagagatggctcagaggttaagagcactggctgctcttccagaagtcctgagttcaagtcccagcaaccacatagtgacagccatctgtaatgagatctggtgccctcttctggtgtgcagggacacatgaagacagaatgctgtacacataattaatatctcaataaatcttagaaaaaaaaaaaacacacggccactttaagaaccaggtgcccccagcactggagagaccgaaagttagcaactttatcctcaaagcctctccctccacctcacagctgctgccaagacccaaggcaactttgaattgtgatttcactcttacctagtgccttcttgcccccacccccgactcctagcacttaagctagaaccttgctagaaccttccccacttgcaaagaactccctttgccccataccctcagagactttctggcttgctccctccctttaagacccccttgtaagtcacaacacagcatgtctgtgacacctgtctgtggcacttgtctgtgacacctgtctgtagcacctgtctgactgtgacacctggctgtctgtggcacctgtctgtctgtgacacctgtctgtggcacttgtctgtgacacctgtctgtagcacctgtctgactgtgacacctggctgtctgtggcacctgtctgtctgtgacacctggctgtctgtgacacctggctgtctgtgacacctggctgtggcacctgtctgtggcacctgtctgtggcatctatggtgcctttcctgaaatttacttggcatgctatggacctgtgctaagcaatgtggccttggtgacacatgattttacttctaagcacagctgtaccaaactacatcctctcctccaaagcaacccacccagggctctcctttaagggtgagctcacacttccgcccttgtgctttggtgcctactgggctccctggatcattccagactggcaaaggctggggaggcagctagaaacaaccattggccagggccaacctaagccaagcagcccccagaatagtgatggcaccacccagacactcaagaagctcaagcctgtggagaaaaggcagtgtggctggctggttggctcaagtgaaaagaccctgacagtcaagggctaccagacatgtagcagatcctgcctggtccctgtggtaagagactctgtggtaaggaaatgagtcagacccaagtggttggcttctgatctaaccacatctctgacctggcccacaccttcactgaactttgggttgctaaatcccacccatccccatatgtctcctcttctgttccacgtaggctcccagcctcagcctgtcccccatggcccaaccctaatgccactctggaaaaagaaagagctacccaaaacagaagaaatggaggggcaccctcctctctgtgcctgcccctccgccctcccataattccagggtgcccttggtgatgcccctcccatcttggacagagcagaaacatgaggtagaggctagactaagcctgcatggacgtggaaatccacacattaacctggaagaagcatgagagatgggatcctaccaccagcccaatgggtactttattaacggttctcaatgtccctgacgactgcagggtgaccccagtcacaggatctcaggcaacatgatacaaaatctcagaggcacagtaggtgcagaggtggttacgtagccagtgtgtaggagcctgatgccctgtgactgtcagcaaagacatgatactttctggtcccaactgctgtccactgatccctgagaaggggctgcaggctggggaagcattgtaggacccccacatgggctccatctcagacccagctgctcttgtcattagcgatgcatcagcttgcagaaggctaagccgtgttcccgggctttgcatcatctccccatcaactggtagtcctcaaatctgattagcttgaggacaaaattccaacacatcttgtttacaaaccactaagaacatcatcccacttacagtgcccttgccaaataattggaagaaatgtgcatatcttcgtatgaccacactggggcggaagctgcaggtgttccccatgctagaaccagaaaagcagcctacagatggctcctagggacagcagccctaccttataccctcagccaaggacctgagcccccatgacacactagttccctcttctcacaaagcaggtgcttcaaatcaggaaagaactcaagagcctctctggggccctagtcccttctgtccctcagtcctcctgagtgccctgagcctgccaggccagcagcttgcctgcttgagcagcttgctcaagattcctggtcgatactggccacactgtcactagaattctgagccacaaggtgcccaggaagagtcccactgatgtgacggatggcaccataggtctgctgctgctgtggggataacgccgtcctctcggaggccaaaccattcagaatccgaggcacatagggctgttgacaaattcaagagtcagatcttggatggtggcaggcctgacgctccacgtcctggtcataccctgtgctacccctttctcccaatgggtggatacatatcaagaaatagcattcacatggggcatctggacccaaaacaagccagaaagcaaaagggcaatcagcctacaacccaattctcacgatcatatgaaacaccagagcgactccctctagttctaaaaggaagcactccttcctgctactgtattctgggtgactgtctcagtttatttgggaaccaggctgactatacagacatgtgtctgtcagctctgcatcctcccaggcccaggccgtaaatgagggatctccagcttccacgcagcctgttctccttgctggctgacagggccaagggtgtttctgggtaatcatgctcctgaacacctagttatcaggggctcgtccaaggacagaccatagaggaggtatgagtaccccaggatggtagctgctggaaggagtgaggctgagcaggccagccagtgtcctaccctcacatctgttaggatggccagaagtcaccactctaccatgtgggactcaaggacaatgctctaccctgaggtagcaccctggaggatagaggcaaggcatggaaagccaggaagaagggggtctttccaacctggcacccccttctggaacaggtgccctatgcatttactaaactccaaaaggggtaagccgtcacaggaccccacacaggcacttgaataaccagtgacaaagctgcacccaaccacaggacctcctgacacggctacactcaagtcccaactctccaggcagtgggttggagagagggcaagcaagcagggcactgtagcccagagaaagatgggcagccattgggcagagtaagcctcagtggccaaggcagcttctggtgtgcaggtgcagcattctgtctgactagggagccctttctattgacatcaactcaaaactagcctgccaactgacctggcgtctgtttttagtcagagctcttccagcacatccctatggcttctctgaatgggacctcacagccagagtgaccaaaggcagccaccatggggatggaaacacagatagcttactgtgaatggtgggggcacgtgggcctctgcttcacttcctttgtcactggctgactcttctgtctgtggagaacagcagggacacaatgatgaacagaaccggtctctctgaactaacatcccctaaacaaacagactagtaaccatcagaataatggaaccaaccggcaccaggctcccagcacagctcaactaagggaggggcacagggacttggaataggggaggggagggaagccacatcacaccccctcccaaagaaaagctggggaaggcgggtagggcagtcatgtggggaggaggatgagagagtcaccctgtgggtccagcctgaggcatggcagacagccaggtaccttgtagttccgggggctcaggtgcttgaagcatccaaagcaggtgtagagcaggcaggccaggatggtgagcagcaccaccaggaaggtgaacagagtggcgggggcctttagacctgggaacaaggtgcagatgtaaggcaggggacttcctaacacacttgctctgttgaggaaagggccaggcctggtgcccaaactgtgggtgactgctccctagccccgacccctgcccctcactccaacagtcagaacggcacccccacagccaagagcacacagggataggacccacgtgttggctagaatcatccctagccaggttttaaatactgggacaccaagtaagtggtcatttgacggtgggattgctgggacaagccccacccctgccagtctctggagcctagggctagacaggacagggactacctggggatgactgcagagtttcatagcccctggctcagggcccccagaactgatacagtagctgcctcctcctcggggatttctggagctatgtcacacccagcctagctcagtagccaggctgtcaacaccatagcaaccatacctctcccaggagtaccatgctccaccacactggtgctgtgaaagtcgttagggacacagctggctggtgtgcatgtgggaaaagaggccgctggcacgggacccagagcagagtgccccttacccagacgaaggaaggagtaaaagaagagccagaagaggcagaggatgggggcggccaaggcctggttcacagcggcaaagtggatcctcttctccagcttggccgggaggtaagcaaagtagaggttgtggcggtccaccatatgcttcagcaggatgtagatgaggcctgcgaaagaggggctgtgagctagaggtctggctgggccacagtcccagctcacgggaggcagaggcaggtgcatctctgtgagtttgaggccagcctggagataggtagatccaccagacagagagctccgtgtttatccagagaccatctcaaaaaacatagtggagagtaatagagaaagatatcctagggtaggcatagttgggacacctttagtcccaacacaggaggcaggagcacaggagggcagatctttgggagtttgaggccagcctcgtctacatagtgagttctaagccaaccaaggctatgaagtgagagcctgtctttaaaaaaaagtcaaagaaagaagaggagagaggaggagaggggaggaaaggagaggaggggggaggagaggagaggagaggagaggagaagagagggaaaatatccaatccaatatctacctttggcctaatggacacccacatgcagccacgcacacttacatacacacatatacacaaatcaaacaagataccatggtgggccaaatagaaacccacaccagacatgagagaggccagcagagcaaacatttagaaaggaaatgaagttttttgtgtcacaggctatggttccagtaactacaagatgtcactctgctgggaatccactgtgacctggtggtagcaatctcaggcaggcatgaaagagtcagctgtccacaaaccctgaggctgataccaggaccacttaccgaatggcacgataatggggcaagtgatgctgtaagccatgattacagtgaagacacacaatatccatgcatacatggctccaaactcgtattcaaaggcctggttctagggaaagaaagggttaaggagctcacaggctggttctgcccccaaacacccttctatgtgctccaagcatggggatgggaggtgtccagcagggctggggaggactagttaggtaggagtacttctgaacagcttggctttctcttctccagcgaaccccagagtctctcagttcacagccagatcttccaaggcatggtgtgtgtgctctcatagggctctcttgtaactgtgtccaaccaccagggctatgagctcctggagcagatacaagctagagtatatgagagtccacacagactggaccatctccctgccaatagctcaaccctagctcaggggacctgggccagctcaatttgtaccattgtaaaacgaggagattagtggtgtccatcccaaaatacagagggcaacaactggcctcctatttcttttcaccaaggcatagggaaatagcagccccacaccacccaacttaggaggtctagaaaagtgccatagcctgaaataactttgacctcagaagtgctccttagaatccagagacccctaggaaagggttgcatatcatctctctattgctaagcaggtggtgattaaaccattgaatgtgtagcttttagctatgtggttttttaagcatgaaatgcagacatataattgacagctgaacaaaaaatacaagatagaaatgcaagccattaatagaataaactttaaaaaataaacacatggtcaaaaataaaatccataaacatatatcatggtggacggtagctatgtgcacctagctttataaccatggtcatctgaaatcccatgactggcaatattttaggtgggtcaaaatacgatcaccgccccttaagtagttgttcaaagagctaagatcttcagtttttttttttttttttatctttcttgagcatataaaaaggacttcatttactgaggaaatttaaacatgtttatgaatatacacaatgcttccagaattaaccttgggagaatgtactattacagagtcaatttttcaaaaaggcagaaagagctaattagaaacccccatgactccctacacaatctatacatccagtactgggaaatgtgtgaagatgaaattcacggcaaaaggagttgtaaagaaaataatgctgataacttaaactactgagaagaaaactcgctcattatggttataaaaaatctgaaagaagcaattaacagagaagaagtcttttgcccactttttcatgaggtttactctaccatgcctggtggggcagctcagtttgcatcatggcaagccaggtagcaaaagggggatgctggaactttggggcttctcttatttttccccttttatttctacccagatccctagcccatgggacagtgtcacccatattcctccctcagttaatgctctctggaaacagcctacccagaggtgtgtctcatccatctgccattagctatgtgtttcacgcatggtaattaactgtgattgtcaacttgactgggttcaaaatcaccaagaaggagacacagctctctctgtaagtattctagagagacttacacacccacacccaccccaaggtatgtggcatcattccgtgcactaacgtcgaatgctgaatgacagagggaaaagagtcagcaaactaagcaccagtattcgtgtctctctgcttcctgactggatccagcgtacgcagaactgtctcaggctcccaccccacaggtagaaatgctctcacccccataccttgtctccaccacaaactgtaccctcaaaccagaggccaaaagaaatccttccttagttgtttctgtcaggtgctttatgagggggatgaaaagttatacagtgtggggccagactggttaaactgcaaaaatccaagctctttcttccagcccatgattcagattggaagctagagaaggacttgccatgatccaaagaggttccaggcagagatgaccctgggcccggacttgaaaagctcttgtcacactgtgcctagcacttattccagagagctgagaggtgggcggggtggggcggggcagggcgggcggtgagcactggggaggatgggaggtggtacctgtttaacattcctgcggtcagcggccgtcttggccatgatcatgcgaaaggtatagaggatgaggccgggcagcctcaccagctccatgccactgccgatgaaggctgaggcgatgacgtagttcacaaagaaggcgccctggtctggcaggaagacacacctaggaagtgacacaggcctgtgagctgggagcccagagcttcctcctagctggaaggagaatggggacctctgggagggttttccctgcacccctcatttggcacacatttgtggagaccgtctggttgtcagttactatgctgagagctaagagtaaagtttagcctaatgctggtaatccctccatggagacagtggaggcagggggatcatgattttaggcccttctagctacagagaacgactttttctcaaatttaaaataaaataaactaataaaaaaaatcccagcacttgggaggcagaagcaggcagatctctgtgagttcaaggccagcctggtctacagagctagttccaggttccaggacagccaaggctaccgagaaagcctgtctcaccacaagaaaaaagaagaagaagaagaagaagaagaagaagaagaagaagaagaagaagaagaagaagaagaagaagaagaagaagaagaagaagcgccctggactctgctgacttgcatttacacactctctggggacccaaacaaacataggcatatacaatatggcaggctgaggggctgcccggctgggtgggaatgtcaatgagcttagaaggctgatcaaaaaggcctctgaggtggagctggagagatggctcagaggttcagagcactgactgctcttccagaggtcctgagttcaattcccagcaactacatggtggctcacaaccatccgtaatgagatctggtgccctcttctggtgtatacagataactgtatacataataaacaaataaaatctctaaaaaaaaaaggccactgaggaagcaggtcacctggacaccaagagaccttagataatgacatggatgaagagttcctggcattgccaaggaacagtaagagggcagggtgggcctggaaagcagtgggcatggagggggcagaacgtgaggctgaaaagcccctacagcatggaggacagtgtgacagccacaggggtgcactggatgacggctgactccacagcttccttggagatggaacgaggatctcctgctggactgggactgtgtgacaggaaggagaggacggaaagcagcggggtgagctccaaggccctttctgagccggcttgagagttacgaggaagacaggggcataacagatctgggctagggcaggtggagtccacagcgtgcagcaggggctccatctgaggctgaggcagcagacagaagactcaaagccgtcgtatgcaaactgtggagtttgcatttttctttaacttcttggtgccgggggaagcccagcgagtgcacctctggcccctttgtgcacatattttaattcagtagtcggattacaaagaagctacgagtccagacgaggagcgctaggacagagccctcaggcagccaacacctagctcttcaggaagtctcaaggagggtgcagaggagatgctgagggacaggaagccatgagcagagttcagagtcaaatgagaacgctgtctccaggaagagccaataagtcaggtaaggctcacaggtcacagcgaataggaactgcgagctggccattggatctggtagtcagaagccactggccactgcaccaagagccagttgggtaggtatttgtctatctgtagacacctgctcctgagtcaccaggcaactcagcaagaaacaaatgtcccatccttgcaggccagcctcccccacaaccattccccatcactctggagcctttggggctgctgaaagccctgagtataggggaacaggctgaataacaagccaggcaaccttggttgagttactcaacagctctgaaccacccccgcacccccgtctgtaaaatggaggcctgaataacatccacctcacagtgctctctctctctctctctctctctctctctctctctctccttgtgtatgtttatgtatgtgtgtctctgtgtgagtgtctgtgtgtgtgtgtgtgtctctgtatgtgagtgtgtgtctgtgtgtgtgtgtgtgtgtgtctgtatgtgagtgtgtatgcgtgtgctcgcgaacactagatatcttcctttatggctctccaccttattatttgagatcctgtctctctctctctctctctctctctctctctctctctctctctctctctctgaaactggagcccacccactggctggaaatggccaataagctcctggaatcctcccatctctgcaagcactttacacagggaactgtcccctcatggcttcttgtgagggttgaataagaaaaggactcaaacatctagtatagagctattttaacagctgtcaaaattaggggagtgtatcacacagggttgctgtactaacaaggacacataccatccctaaattgaactccattctcctgacaaaacgatccacaggctacacagtcacgatgttaattaggagccttccctggctgggcatcactgaaacccaacagtcccttctcccagaggctctgcggtctgtaagtaagtctcagacaaggaacatgactgccactgatttgagtcttgacctacatgacaaccgaatttctgcaagcacacacacagtaggtcagctcccacagcatgttccaggactgcaagagggttggtgtgattgcaagtcctgctatgtccaagggaggatgcctgtcctgaagcctgacaccccactgtagcaccccccccccaaacacacacacacaaaactcttcagctctgtactctggatggcagctgagccaatacttactctagcctgatggaaccatctgaggaagttttgtcaaagagccaccggaagaagaaatccaggctgaaagacagatgaattccgtgaatttcttattcatttggatttagaggttttttgtttgtttgtttgtttcaatactggagatgaaacccatggtctcacacacaccagtcaagagccctgccttcaggttttcttcctcaagcttcatatggtcatgactcactttcatttccttcccctctaaaagcagtcccaatcttgagacatttgtcccctgaggtgccccttatatgtgactctcacacatgctttaacaggcacttccttccacaagacaaacacagccaggactagaccctccctccaggggaagtcctctgtaaattttgttgacaagctctttgttttcaaggactatcatatgtccagactagatggcaaaagctgggccctgcttctgactggggctggacaggaagcagatgtacctagtcaggccgagggagggcaggatcagtaccatgaagatcaagaatatgtagaccttggacaccatgatccggttttcccccgacctgcaggggacagagacaagtaagacccagcgatgtgcccgctgccctgggtggagtaagaggcatccaccccggaacaggctcaggctctgctcacctcgtccaatgagattccagcaacgtggagtagtatactatggatgggagcagggccgagaaggaccagagcaggagggtggggaaaaactggctgatgacagggttctgaaacacaagggccaccacacagggtcaagataggtagggttgggggtccctggggacctggtggctcaaagtacttctagccatagtccagtcctcagaccctggcaaataaacaggaactgcacttcttgataacacagaccttcacagcaaagaaaggaggacgtgtgcaatgaggcgccactcatccgatgggccagatgagaccggcttctccatccccagtggagagctgagggctgctgattggaggtcaggcctccaccccaacgggcctgccagtcagctcgccacagctccagggggtctgcccctaatcctgttcctactggttggactggctactgtcattacagaatttattttcactgattaaaggaacacaaaaacaggaagaaattctctttgaacactaagctggggctatctagaggtatggctcagtacagagtgcttgcctagaatgtgtgaattcccaggacctcaaaaacaaatatgtaaaaatttaaaagctgaagttgaacatttttaaaagatttactaaggtcagtttctaaaaacatattgttgaatcacattagaataaattaggggctggaaagatggctcagtggttaagagcactggctattcttccagaggacatgggttaaattcctggcacacttggtttcctctagcactaggcatgcatgtatgtttaaatgtttgctttaaaaccctgtctcaaaaacaaaacaaaacaaaacaaacaaacaaaaaaagtagcacccaaatgctaagggtggtgaattatatttgcccagtgttggtggtgcatgcctttaatcccagcactcgggaggcagatgcaggcggatctctgtgagttcaagaccagcctggtctacaagagctagttccaggacagcctccaaagccacagagaaaccctgtctcgagaaaaaaacaaacaaacaaacaaacaaacaaaaatgtttgctttactttatctattcatttatttgaggttcttgggacaagatgaagggctttgtgcctgctttcttgttttatcactgggctacatccacagttcaaattcttacttaatgaaacccaaactaggatcagaattgatgaaataataatgtagtttatacaagacaaaggggaactccaaccatcagaaatagactcagagaaacttgtccctacatcaaaagactggaaagagaatgagttttacctgctgtcagtctaaaggaaactatgccatgtatacttaaatgttaggtgtaacatgacaagtgaccaatcccagctaatagaaggaaaattcagactcagaattcaccagccagtgatgacaaagccaggaccagggtttcagggcccctcccaagccgtgggattataggtgtgcactaccggattcggcacataacctatcttagcctcttgggtatctatggtgcctgatcacctgaggtgttttgaaaagaaagttaattaccttcagcaaatacaatgctttaaaacaagataaccagggctaaactgtaaaataaagccactcacaatcccactccaaccaaggaggctcctttcgtgtgtcctatgccttgtgttccttctctgtctacatatatacgcggtcgttggagccattgctgaaaagcaactctacatggtgtgttggcggctttgtttaattggttgtttggggttttttaaagcttgcttatttttatttatgctcatgcatgtttgcctgtgtgagtttatgtacaccacattcagcatgctgtggagagcagagtgacaggcagctgtgagctacctggtgtggtgctgggaacagaacccgtgtcctctagaaaggcagtgagtgctcttaaccatgagacatgtctctggacctggctggcctggttctgaaacagggtctcactctgtagacctgcctctacctcccaagtgctaggattacaggtataagccatcatgccatgctgtatattccgcttttattataagcttaccaaaacaactatgcagtttttcataaatgcttcacattttcttcagactaaatagtcttcattcaactgaaatgaattgagcatcttcctgttgagcactaaactgattccattaaatgaagataattgcatgaccataaaggctccataataaacatcaccatgcctgcttcaagcttaaaatggcaaacatgggctcagaagcacccactggacaagactacttgctgtgcaagcatgaggatctgagttcaaatccccagcagtccatgtgaaaagccaggtttgcacatacttatgcccacagcactgtaagtagtggagacaggaagatagctggaagctgccagattcggaccagggtcaatgagagactgtctcagagtaatgcacacacacacacacacacacacacacacacacacacacacacacacacgggcgctcacaggacaaacatgacctgagtgacatgtttgccatgtttgtgacatggccccctgcttcaaaccttcaaaccttcaggctccatgtccagttctcaccgcccccccccaccctcttcctgccggttattcactcacattcagtgcatggatgggtttggtgacgttgaatttgtccatggtggatataatgatggagggcgtggtcaggaaaaacagcaccacaaacagagagaagttgatgcccagccactggagccaccagcggacaccctggatggagaggttcttcctgcagagggtgacaccagccaggatgctcgctgaattaactcccaggcacaggccatctacggcaccacaggtgcccatggctgagacacatcattaggtcaactttagggaggccagactagggctctggctgctctggacctcaagagcaaagcaagttctctgcactggcctttggtcataagaaggatgaatttcaggtcccagagctcaggagaaaacagctgtcagcagtgatgggaaataccagtgatgtcacagacatccgacactgtccaggcaaaactccagcacgatgcttcttgagtgatacaacgctttgtaactaacagcacacactttcgagggagggcatgggctgaggttcaaggaggcaagcagggagcataggcacacccagacctgactcctcctcccacaaaaacagcctcaattctgggatgttctatgagctcaaaagcaatggatatgtgcatccaagatttacttcacccgagcagctgagaaggccctgcctagcagacggcttgctagggtgcctccagcctcagtgtgggtcctaaatttcatgtgaggtctacagacgtggctcagctcagtaatatggcctctattccaactgtgctgtgtaatgtggcaggcacatacccacgcggctactgagcacttgaggcgtgggtggcctcagctgagaggtgctaggagcaaaaaatattcaacagatttcagagactgagtatgaatggaagaaacaaaagtcttgatttaaaatatatacatatataggccgggcattggtggcacacgcctttaatcccagcactcgggaggcagaggcagatgaatctctgtgagttcgaagccagcctggtctccagagggagtgccaggacaggctccaaagctacacagagaaaccctgtctcgaaaaaccaaagggagatatatatatatgtgtcacatgtttaaacgttaagatttggagtgtactgtaagaggcttaaattaaaattaatttcaatcacttctttttctaacatggctaccagacagttttttatgaggtacatcgctgacatgctatttcttctggacagcttttgaatgctagagactgaccatgggggaagcatagactcccctgccagaccttatccaacacatcacagcaccaggcacagagctgtgtagccattaaatgcaaggccacaggcactagaggagggatcaatgattgggagtgctgcctgctccaggggatccagaatcgattcccagcaccaacacagaggctcccaccatctatatctccagtgccagagaattatgacgccctctcctggcctttatgggcactaggcacaaacatggtatacacatatacatacagacaaaacacccatgtacataaaaattaaaataataaacccatggaaatagaatagtaaccagcatatagtaggtgtttaaatatttgttaaagagctgggcataccggtgcgcacctttaatatcagcggcaggtggatctctgtgagttcaaggccagcctggtctacatagtgagttctaggacatccagaggcccatctcaaaacaaccaaaaaataataaaataataaataaattttgggggttatttgagacaaggtttctctgtgtaatagtcctggctctcctggaactcgctctgagaccaagctggcctcaaattcacagggatccacctgcctctgcctcctgagtgctgggattaaaggtgtgtgtcactatctggcaataaataaatatttgtttaagaaaaaaaaagccaggctatacctatgctcagggtaaccaggcaggcaaatacacacacacacacacacacacacacacacacacacacacacacacacactattcccccatccctccatcctccaacccctacagaaagccaggtctttctcccaccctccccagtctgggaatttaccagcagatgtcctcagggtaggaggcgaagctgacagtccacttggagacgcagagctctctgctataggaggacggctggggctcacctttacaccgaaaaccctggcacttgcaggcattaaagtctttcaggatgctgtcaagaaatgcacacggtattacagtgtggttcacctgcgtcccacacatccacagcagccgcagacagagtaagagtgagaacgcaggatgcctgccccattgttactatcatgttgtaattagtgacccacgtatggtgtgctgcacacctgcaaccccagcgctggggaggctgaggctgaggcaggaggaccaagagtagttgtggtggattgaataaaaatggcccccataagtccatagggagtggcactgttaggaggtgtggtcttgttggagtgggtgtggctttgttggaggaagtgcatcactgggagttagttttgaggcctcaaaagctcaagccgggcctactgtggaccctgctgccagatatagaaccctcagctccttctccagcgccatgtttccccgccatgacgataatggactaaactctgaaactgttagccagccccagtcaaatgctttcctttgtaagagttgctgtggtcatggtgtctcttcacagcaatagaaaccctaagacagtagacaaggccagcctaggacacatagtgagttccaagccaatcagaactatttaagaccctgtctcaaacaaccaaaaagaaatgccatgcctgccgcactacagaggttttggttcgtcctcttcatgactctgcaagctacaggttgctatatcattttacagacaaggaaaccgaggctcggcacattaggtttcagcattcccggccgcctggcccacttccatattgtttgcactgtcctactaaaacatgcctccaaggggccaccctctatgcctcctgtgacactggagcacaaggctgactctgtgccacccaagtggctccacttcccagccctcactttgtccccaggccaggaatagcaccagtcacagtgcatactgctcattcctgaagttcccgcctagggcttgtggcctaccgttaacatctcaggctcctctctgttttggctatccataaagtagcccacagaatctcactggtacctcagagtacctctcctcttcctacagtctgaggccagagcccttgctaatatccatccccagagccaccatgcctgaggcacagaaagcacgggagggttgacatcctctctgcaccccacacacactcagtcatcaaaggtgaggtgacaccaaggtcctaggcctgggagtacttcctaagcttgcagctcaggatcctgtagctactgacacccagagtggctccacggtgtccccatagctgtccatttgtcaacagacagagcagggccctgggtcctgagtttcaatccagctggcagaatgctgcacacagacagaggggatgactggtgaacgctcaactgtgggtctgggacgcatcacccggcaggggtcagcccggacccaaccctacccactgtcactcaaatacagactggaattcccccaagaggcaagggccgtgtgcctttacacaatagtcagaaatgagcaggtggggtcaggggggcagccacactcacaaagtagccatggacttctcacggaaggtgacaaaggccattcctaggggctggtcctggacccggcactcctcagctgcaatcctctccagcagactgtcattcatttgggtgtagtaagagatagcatcttcctgcgagaagacacagcccctgggtgatgtgaccctgtgcaggcgtcgggggacccgtgcctgtcccctgctccactcaccctctcacagccccgcacttcgcagcagcagaactggccacaagtcttggggttgatgagggtcagccggcccgtcttcgcctgcaggtttgtgtaataggccaggctcttctctgccttcctcctgaaaggtagcagtgaggcacaaactgggactcaccgtcccagggtcatgccacagccaacaattagtcaccagcagggttaggggtttaatgttgagatccagaaagaggcaggcccaccctccccctcgccaactgaaggatcccagcaaggaagcaggtgggcatctgggggcaagacctaggaaagctgcagctgaacccaggcatccacctcctcacctctccctgcacaggtgcatcagcttcgccacgctgtagcacagctggacatccaccacctcacacgtggggtacgcattcctgtggccggcaaggaggagggaaaagaaagccattggaagaaaacatccctgtagaaatgaccacccatccacccttgcattggagtcacgctgctgctgtttgccgattgtccctgatcttccagagagaggaaaaatgtgaagtttaatacaaagaggtaggtgtgtgtgtgcgtgcgtgcgtgcgtgtgtgcatgcgtgtgtgagtgtgtgtgtgtgtgtgtgtgtgtgtgtgtgtgtgtgtgtgtggccatatacagaatgctaaacatatactgtatcactttttacatctcaagccccaaaggcattttttttcaatttttaaggcatgaaagtaactgcagtaaactggtaagtgtgcacctactcaacttttggttagtaagtttctcatggggacacatgacttcgcaggactgaggtaaggctcagtggtagagtggttagcacacataaggccctgggttccatccccagcaccatcatcctcccctgccacccaatggaaggtattgatcatctattctagggatgtatctaccttaggttatcattgaaatcctaaccccacccccaacctttttgaaggcaacagacctctagagggtctgagaacagcaaaaaaaacctcaggctggaaaatgtctagacacatattaactgtcaaaacacacacacacacacacacacacacacacacacacacacacacacacacacacaaaatgcctgcatcaccaagggtaaaggtaagtgaatttttgatccagaagttgaattcaggcagccaagctacaaggtcagccaattgctaccacaaaatggccctgagccatatacaaaacaatgtccacatgactcccaaggactccaggcccatatcaggcaccacctgctactattctgggtgctgggagcagagaatgcttaagtttaccttttagcaagtgtgtgagagcaagcccatggaggagccaactaatttgttggtcaggaacaccatttcagaccccaacaagagctctgatgagggctggggatgcaattcaatggtaggggctttgcctagcaagattcagtgatgggagccacaaaaagatggaaagaaggcttagaggaaggggttcctggtgaaagtggccctgctgcaaagcaagtctacaagtccattgcaacagccttccccaggaaggcttcctaaaacagggaaagtctgagtcacacagtgtttgcatggcaatgagcacacttgtttttctagttaagtgtatgtatgaagtagactcactgtttccaaacactgcctggcaggcaacgcagaggaggatttttcaagggacagaaaatcatcctggtatcaaatgaatatgcacacatattcacagacacatataaacatgcacatatatgtaaatacctccaaaaagagctgtagatattggagaaatctgtcagcaattttaaacatccttgtacagttctgtttatacagttctgtttactcacctagtgcttttgtcacagatcgcacgaggctcacctgtagctaactcctagtatttgtcaatgatggcagaactgacaagggtgaagaggaaaacttggagctgcctcttttgctaggaattgaacctgagcctttccctgtgcttgtggctgtactcattgcctgctctgcctgcaggagctatggctgcagaagctgtcccagagcccttgacagccagaggctctcctgacagacatctaacattcctgggtccgggagaccagctctgtgagacagcttggctctcagcctccagtgtgagcactctctgtacctgtgcttcagcctgcactctggcttaaccacaacagctagagagtacacaccaccccaccaggctgctggcgaggctcagagagaacacacctggaagccacttgatacctgtggcagggatggattaaccctccatattgagacagaagacacaggtctccatagcgcaggcctcagggcctccacacagcctcgttcaccgtgagtggctcaacggggtctttctcttaccggaagtggctctccacagtctcctttctggcttctctggggagtcctgtgatgaacagggtctgtctcacctgccagggaacatatcaggaagaaagtctcagagacaggtcacagggtgatggagcgggcaggtgtcacttccttcacatctccagaaagaaaaccatggtagataagaggttcaggttttctcattcttggccttgaagaggcccagcgatgttattaatgttgcatcactttccaaagcaactcataagtgtcttctgcagggcagggaactgagaaagagcccagggagtgacagtggctcaaaagagtcacacaaccaagcaaagaagttgaaaccaagtcacagtggggcaccagtccttagcacaaactgttctggcttgggggaggggtgctgattagttttttttgtttttggttttggttttttttttgctttgttttgtttttggcaatttgacacaatctagagtcaactgggaagaaggacccttaattgaggaatcacctgtggtgatatattgtttataatttattaaagcttgccagaggattcagaaagcaaagtcagccacaagctatagaagccgggcacacacctttaatccctgcaaccagaagttagaatatggtgatacacacctttaatcctaggactcagaattaagaggtagaggaatctctgtgagtttgaggccacctagatctacacaagagtgaatcagtctaaacgagaattatagctcacacctttaatccaacattaggaaagtatataagacagaagcaaggtctcagagaggcgttccttctccagccacactgaggagaggcagcagtttgagacttggtgaagagctggtgtgtagatcagacctttcagcctgagcttgaggtgagagctggtggtcagctgttttgcatctctgatcttcaggttgaaacccaatatctgtctctgggtcctttactaatttgtgttacaatcacgcaaatcagattggtctgtgaccatatctgtgagatactgtcaggagagatgatggatatcttagggccactatgggtggcacaatccctaggcaagtattcccgaactatctaagaaagccagaaggacagaagaaacctgggagtgagccagcaagcagcattcttcccgagttcctgtttcagttcctgccagactccctcagtgccagaccgtgttctggaagtatgaacttaagtaaacttttcccttaccctcagttgctttgcatgacttaccacagtcacaaaggaaactaaaacgggaagggtgttttatttttgccttgtcatgctaggttatcaaacccagtgcctggcacatagcaggcaagcactctaccactgttcacactctgtcctgggtgtacttcctcacttcatagcagtagctataagccctgacccaaagtacagcttaccaataaattaaatgataataatagtaaattgagtttgtcgatgcatgcctgtctgtattcctaacatttgggaggtggagccaggatgatcataagtccaaggtcatctttggctacatagctagctcaaagtcagtctgacctacacaagaccctgtcttaaaaaacatagtgacaagccgggtattggtggtgcaggcctttaatcccagcactcgggaggcagaggcaggtggatctctgtgagttcgaggccagcctggtctccagagtaagtgccaggataggctccaaagctacacagagaaaccctgtctggaaaaacaaacaaacaaacaaaaaccatagtgaccgatggtggtggtggcgatggtggcgatggtggcggcagtggcggtggagagcataaacacagaaatcaggtccctgcacccacttaaagtgcactgctgacacggttctgtggagaccacgggaggctgtcccttccatctcttacttgagaccctcccagacatgtcccaggccccagccttactcaccaggttctcttctttgtatctgatggaccgtgtgtgatgccacataaagcccacagtgaggaggaggtagatgacggagaatacggtgtgcagccaaaggaggtcattgctaaggaaggtatcacctgctatcagggctgggcatcccaacacaggggatgagttacagggcttgcggtggggtaatcctcaatgggcactttgccaagagccaatagctttgccaccagcagaggccatatggtcaatggccctcaccagcgagtaaatactttggagcaatccctattcttacactgggctctacgactcctacaaaactgaagcttcccaggacatgttcataccacagcccagcaacacagcagctttggggtgtttccagcctgctctaggctcccaaaccagcctccattgtggtcaacaagctccgtactcacttcgtctgcaggtttgctattgttgtcctcccaaagctgtaagggtctttatctgtggagaaacagacacttggttccagggtcacaatgagaacccaggaagtggcctaacagaccttgatttagagttctatagctcagggaggcacatcaaacgatgcctagacatggcatgtcttcctagacatggggagctaggaatgacagctgttgacaattgttgttgatgacaatttatcaacctatttaaagctccatcaacctggacctctgcgactgcttaccatgccagcaaagtcataattaaagttcattttgcactgatgtttgttttaaagacactttgatgacaactagaagcatccttggttgctaccaactcaagggtctcatggttgagaaccaccagatgtcacaagtgggtctgggatgggattttggaaactcctgagatgtaattccacaatgactttgactgtctatcacagacatcgtctgggtccttgaatagtggcctccagcttgggtaagggcaggaaactgaaagatacattctgaagctgggagtggtggctatacttataatcccaacactcaggaaggtgagggaagactagcctggactgcatagtaggagcttgtctcaaaaaaaaaaaaaaaaaaaaaaaaaaaaaaaaaaaaaaaaaacaagcaaaaacactcctgcagaaacctcccaattctatagcacctgtggttggctggctggctggctcactggttggttggctggctggctggctggctggctggttggttggttggttggctggctggttggttggttggttggttgattggttggttggttggctggctggttgtttggttgggttgcttttttccatacttggatttaaggggccctagttcccagaccagatttggatggatcttcctctagatctttatttggatgataattttctcaaagtcactctaacactgtctcacgtcccccagggtctactctaccgagtcccttccctagagccaccgcccccattccatcccaacccagacaatggccagggaaagggtctcacccagcaagtctcctgagaggttgacaggcaagatgacgcacaaggacaagaagctgaccaccaccagcaggaagatgaggtgcctctggaaggacaggtagtggatggcgtcctccccacaccactccaggatctggtcatcactggccaagacacacacacacgtagacacattcttaacaggaggcaggaggcggccaggcctgcaaggccttgttgcatggcagtgttttagcccgattcctttactttgatgcgtggttacaaaggcagagaaaaactgtatagcagttttcaggagcacacgatttgcaaaggcaaagctattggcatgggtgccgggtcagtccgaacaccatgctctcagcagaggaagtgccacgctccgtgttctgttgctagaaacatctatgctccccttatataatgtatgaggcatgtgaatacaaccttcccacaacccctacttccacagcaagatggcagtgcagtgtactggagccctccttctcgccctccctcccctcccccacccccaggaagggcagggagaataaagggagccatgttttgaacattttatgtctcattccatccaactatatcactccttcatgaccccagagatggagtagtgacctgatctgccttcctacacacaaagaattcctgggtcagttggaaaatcccaggctcacaacagccagatttccttgccatagagggagaagggctaggtgttccacctactctttcccaaatattctgcacacagcatgggttccaaggttcctgctccagagaccaagaaagccctgtgtggtaaagccagagaagcaagcctggaagcatgaagaaagtgaatttacacagcacagcatgagctctgcatctgggcaccttactgcagactcagcacagccacacctgaacgggctcagaggaactaaatggccattgccctcctcacccacccagcagagctcaaggctgcaaggaacatagagcatgtccaacccccaaggatgccaaggatgcctgggtcgtgctagtgagctgcatgcttgctcaatgtttcactccagggtgagctttgcaatttacaccttttccttctttttaataacttatttttatttcatgtgcattggtgtttcccctgaacgtctgtgtgagtgtgtgggattccctggaactggagttacagacagttgtgagcggccatgtgggtgctggggattgaacccaggtcctctggaagagcagctggtactcttaaccactgagccatctctccagccccaccttttcacttctaagcaagccatgaacacacccatctgtttcctcttccttcaagaagttctctggcttctcccagtgaccctgcctcctgccagcaaccccagctacaattcctactgaactcccactcaaactcaggtgggaaaactggggccctgagaaagaaactcaatatcctcaaaccaacatagctcattaatgctacaataatccttttcttttatattatataagctaattaaagttttgttgttttgttttcctttgggcaggagttattctacttaatatttaccaccgactgtgtatggtcaggaactctcctagacaggtttatatgcattgggatgaataagtggaaaataaaatgtatattttttaaacataatttatttttatttttttatattccagttttgcctgcatgcgtgtctgagtgaggatgttagatcttggagttacaggtgtgagctgccatgtgggtgctgagaattgaactcagatcctctggaagagcagtcagtgctcttaaccgctgagtcatctctccaaccccgaaataaaatatatttaactaagggctagggatatagctcagaagtagtacactggtctgctatgcgtgaagccctggattcaatcctatattcatatggctgtatgaatagcctcatttggttcaatgaggttctctctctctctctctctctctctctctctctctctctctctctctctctctcaagcttagaacttaaggagagaaatctaagaaatacttggtgataaattcaggcctggttggccacttctgtgctcaaaggagccaaccctcagatccctcagagctacaggagtcttggctctgccacttgttcctgtataccccaaagtctacacggccacgcttgctagacacctgtcattgtgtgtcacactacaaacaagaagttctggcagctaagcaaccactggctataactgcaggccccctatttctaataagtagaaatatgggagaaagggccatcttagaactgattaaagactataaaaaaaactatggaggaggccaggtcaattccaatgaactaatatgtgagagactaatggaagctgtgcccaaggtcaggtggagaagcctacatgtatgtctgtgtgaggttaccaatctcctggaactagagtcacagacagttgtgagccaccgtgtgcatgctgggaattgaacctgggtcctctggaagaacagccaacaatcttaacccctaagccacctctccagcatgaaatatttttaaataaagtttatcactagcttcaagaacctttgaaatagccaggcggtggtggcacacgcctattaatcccagcacttgggaggcagaggcaggtggatctctgtgagttcgagaccagcctggtctactagagctagttccaggacagcctccaaagccacagggaaaccctgtctcgaaaaaccaaaaagaaaaaagaaaagaacctttgaaatccaactgcagtttgggggtccctgagtgccagtagggctatttacctgaaagagcttcttccctgtgtcctaactacagggacttccagccacttttgttctaacccctaaacagtttggggtttggggtcctaacctggaaaagtatgggagacgccatcacaggatcaaacatctcagctacttccccctgaatgaacaaacgcccacacaaaaccacatgccccagcagacacccctatcttactcactgcaggcggaagatggcagtcagccaagggcagcatccctagagacagagagcaggcgttaacatccaacacccatgtctttgggaagcagatacaatcacatcgttgagattaaataaccatcctatggcttgctgtgtaaaacaggattctccttctcacatttggtgagaatgctctcattccttgcaaggcacaactccattcggggaagggattaaaaaaaaagacacaaccttgataaaaaaacctctcaagttatgtcaatcagtggcattatataagctacagggtcaaatcaaaaaacgtcaatcaagagctggggaaagtgatgtggacttctataaaattattaaattgtttccaaatggcaagaagaatgggacaaacaaaacaaaacaaaacaaaacaggaacaagtcttgcgaattggaaagtaccctagagccggtcctggagaaggaaagagtatgtgtcagttctgtgatctcttatgtcttactgctccataaagccaggtggctaacagctgggaaagcaaatatttgttcatcacttattcaacaatgactaagcacctaccagatacctagtgctgggggacaagggtgtatgaggtagggtttctgcccacatttggctcaaaatctagcagacgagtcaataattaactcttacacaagaaccatatgtatgagagaggagtaactcgtgtgtcacagtcaagttgctggcaaagccctggggatccacagccctttctgcctgcagttaatggagccttgcaatgagggatcccttaaacactggaactccttccaggttctccaagtcctcatgtttctgttcatacagaagggggctttctccagagttgaccattctcagatcacggtgctgctgttagtcactgaactggagtaaaactgtcctccaccaatcattaccgcaggctgcaccctctgccctttgggccacaaaaacaaccatcccttggatactaaccagttcattttcaaagtcgtgttgccctgaggaagaagataacgacctctggaatctggcctcactggagacatgaaagaaaaagaaaagataagtaattataaaattcaaaaatgttgaatatacatttccagtattttgtttcctaattttagagttcaggattaaggctgttgactctcaaaagttgcaacaactataaaccactccccccccaaaaaaaaaacaaagatggaggcaatgcccacaaacccatatgacacaaaactctatgttgtacaggctgaacagcacacggccaggggcacatcaacgaaccatacctgtgtgtacaccctccaacctcagcactgaactggtccccttaaaggaacttcagagtgttgcctgtttacagtgcagttcctaacacatccaaatcaatttggaatgctgtattttattccaccaaagtgactggaatgacaggcaatagagtcttcatttcagagagaaaaaaaaaaggcctgagaaagagtggccatagaaacaaaagataataggtgaacaaattacccctctcccatccaggaagtagttaaagaaaagtaagaatacttataaggcctcatcaatggaatgagtccacttcaaaacacacaggggactgcagagttggctcaggggttaagaacactgactgctagccgggcattggtggcacacacctttaatcccagcactcgggaggcagaggcagagttcgagaccagcctggtctacaagagctagttccaggacagcctccaaagccacagagaaaccctgtctcgaaacaacaacaaaaaaagaacactgactgctcttccagaggacctgggttcaattcccagcacccacatggtagttcacaaccatatgtaattccagttccagaagacatcctttttccagacatgccctctgtcctctgtgtgaaccaagcacatgtgattcacagacatgtacacatgccaaacacccatacatataagataaaaattataaaaaatatacacatgtgcatgcatatacattgtattcctgttttttatctaatccaagataccagtggtggtcaggtacataatttttttttaatgaatctttaagaaagaagcaatggtgccaattaagctgtaactgataatctcatgttgggcatagtggggcacacctataattatcccagtattcacttgaaggctgaggcaggaggatcccaagttcaaagaaggccaacctttgaggccaaagcataggaaatattttctcaaaaaagaaaaaaaaaaaaaaaaaaaaagaggcatcccatttccaaactcaaaggtgagaaacgctcaagtgtgaatctcagagcatatgaactggcaagttaaatacggtggcctgcaagtgcatacgtgtgtgtgtgtgtgtgtgtgtgtgtgtgtgtgtgtggacacgtgcgcgcgcgctcgcgtgctaaggtgcagatatacatgcacacacatgtgggtgaccaggggccaacacttggcatctccctcagtctctcttcatcttatgttttgagagaatctttcgctgaacctggagttcagtgctttagccaaggtgtataatatattacattagtaaattgtcatgtgctgtctgagctcactgagaggctggccctggaaatgggattgctcaccctacctctctcggcatttcaaacccaaacatatctatctcaaagtatcctctaagaacccttgtctgtctgggaatgagaggccctgctctagttctgtgacaaggagagaagagcaaaaccgcactctcgtgtgaaagggcgagtgagtcctcaagagttaggaagtaaacccttcccacagaagttacttcccgcagcctctccggggtgctgaggtcagggccttcatgcttaggcccaagctgagtggaactgttaaagggatcttctgcgggcggaaggaagcatctctctaaaagtcccttcctccccaaccccacctctgcaacatttcagaagctaaagcaatgaccatgggcctccgggatagacctgagagtggagcgtctgacacctcccgttcacttcaagttgcctcatctgacacacgttccagagcttcacagcaaccagcccaaacaggaaagtctagttctaggattcgtcttcacctttagtaaggtgcacagaactgcccccacccagggcagagcaggaaaggcctgaggtctggccagagaggccgtgttttgttaacaggctttaagccctgaccaggaaggaaggccggcctcttccccacacctgccttccttcttgatcactaagccagccccaaagcaaggtaattaatgtcaaatatgatattctcagagagctgtgtccaaggtgagaaagaaaatgctatctgcttcccctagagacagaaaccctaaaaaatgctacctgtctcccctggagatagaaaccctaaaaaatgctatctgcctcccctggagacagaaaccctaaaggcaatgatggtcctggacagcctgaaatcagagccccaggagagaggctctccagcactggtttccttgagtacagctctaagcaggcagacctcgaagggggtctttggtgacagcttctggctccagcccatcccagaaacacacatacataaacataatacacacatgcctacacacatacatgcacacacatgtaagtaaacatgcatctgcatatacacatgtatgcacaatgcacacatatccacacataacactcacactcagagggctgcatagacacggtcacatgctcggttaactgttttgtttacctgcctgcttctgataccagggctatgcggccataatcccagaatcttctccttatgaaggaaaacaccaggactaaaaactaaaaggagaaaaaaaaaaaaaccaagtcaaagaacattggccaggctctgggcacagctagactcatcgggttagaggatcccatccaagccaaaaaacacacagcttagcagcctgacaccttcctccactcattcaatagccttcatcacctgtgccatgtcaccaaagttgtcacactgccacaggcttgagtggagtcttcctgctcaagtatatcagccaaagcagaccccaagtcagaaggtaaggtgtgacctcaccagattggaaaaaccactctccaatttacttcacacccaaacctcattcttagagacaagccctaactagattgccagacttgcctctgactcctgagttcaagtgatcctccagcctcagccagtggtagctgggactacaggtacgcaccgggcttgatttttcttaattatattttaatttattttgagtcagattctttgcatttgtttcttctaagggcaagtttgcagactccacacagcaagtgtatccagtgaaacctgtcatgccctaacactctaggctggcccaacccccagagctggggcagccctctgtgacaccagtcccatgtggagagtgagtactctctctctccttattagctccagatgtccgagatgctcacctgtccctgccccagactctttatgtccaccttagccagctctccccctcccccaacctacacaggctcctttgagattcagagacgggtaagagaagcatctcaaatagcacaggcttgccttctcgggtcaaaaacaggactgatttatttatgcatgtgtttatttagtgctgggatggaacctggcaccttagatgaactaggtcaggactctaccattgagcagagtctctgcctagaaactggcttttaagtgtgaatggtgcttcctttagggaaatccaaagccctgagtttctgtgaggttttcttgaggtaagtctagatgtgaatgatatgttttcaaggcagaggagtcacactgtaggacagacacaagcccctcggcattcggtcgtcctctgtcactctgtctcacctctgtgcacacagtgtggacatctcacccacacctaggtcttctatcccaaacttgaccccataaattcctgcaataaaaatctacactcatagtcaggcggtggtggcgcatgcctttaatcccgggcagaggcaagaggatctctgagtttgaagccagtctcatctacaaagtgagttccaggtcagccagggctacacaaagaaaccctgtcttgggggaaaaaatccattgtggttgtaaactcctatataacctatttgagtagctgaggcaggaggatagcttgcttgagctcagagatcacttcagcaacatagtgataccttgtccctcttatttattaaaaaaaaaaaaaatcaccctaccagagcaatctaaatgagtgactttcttcctaagcagctacctaacccacctgggctctaaagagttctctccgggcctagccgggccttagcctagctctccccatcctgaaggcataggatcccagcccctgtcagtattctgccatctgtgcctgcccctctctcttggccaaggcccacaagcgtggataagggttctcctgcggtaagggctcaatgtagcccttggatcttagtgaaaagacaattgcatgttaaccccaataactctaaactgcccccacccccgttggtggcgcacgcctttaatcccagcactcgggaggcagaggcaggaggatctctgtgagttcgaggccagcctggtctacacatcgagttcaggacaacctccaaagcaatacagagaaaccctatctcaaaaaaacaaaacaaaacaaaaaccaataactctaaactaatcaggctgggatgtggctcagtaggaaagtacctgtggagtacccccaaggccctgggatccacccctaaagcaaaacaaaacaacacacacacacatatacatgcacacacacacacacacacacacacacacacacacacacatatacacacacacacacacacacacacacacacacacacacacacacacacacacacacacacacaacacacacacacaacacacacacacacacacacacatacacacacacatacacacacacacacacacacacacacacatacatgcacacacacacacacacacacacacacatatacatgcacacacacacacacacacacacacacacacacacacacacaccttcaaccatggttgagtcagtgcaaagataataacacttgtttcaaattgaaggttgacattaaagaaagggacaccttccgggcagtggtggcaaacacctttaaccccagcatccaggaggcagaggtaggtagatctctgagttcgaggccagcctgatctacaaaacaagttccaggacaggatccaaagctacacaagagtcagaagaaagaaagaaagaaagaaagaaagaaagaaagaaagaaagaaagaaagaaagaaagaaagaggaaggaaggaaggaaggaaggaaggaaggaaggaaggaagacgtatcccctaaggtcagctctaggaaatctatttctgattctcaaaagccccaggtaccccagggtgacaggaagtacccactcacacactacaagttgtgcctgctccaaccctggtccgtaccctcacatctctcatgtcgcccaccctgagggccggtaaaacaagacagtggctagtggctctgcaattgagatcatgatcacactgccacacaaggcccaagtcctctggagaaggaatcattacagtggttccagaactcgaggtccagggtcacagagcatggaagggtgtgtgtatctgcctcgtgcatttcctagacagagaacaaggtgttaaacacataactgagagagggccttaccagaaagcagatgacatctatgagcaggaccgtggggacgcctccgaaggtgaccccctgaagcacagtgctgctgtttctgactgagctgtagcagtaagagtcattgtgatggtccccaagggccaggctcccacggatggacactgccttggactgccggggatccaggaatgggtagctggtcatcatgccttctctccctaaggaacaagaacaacatcagggtgacaactttcagtttccccagccagtgctgacacatccaaaaataagtgtcagtccccatgcccaccctccacccccatgcaactggaatagcagagaccctcagcacagagccaggaaagctgcgctccatccctctgtgcctggtggagtccacagtgactatctccatttatgggaacagcccagatggtcagactagatgacccacccagcgacacaatgagcagatgccccaaaagcgggtaaatgaggcaaagggctgggggtggtcagagttagccgctgctgtgactgaagaggtgctctacagttcctctagcctcatgcaccgctgggaaaataactcctgcaagagtcctcgggcatcccaggcaggagagaggagagaggcccacaaaggctgggaagaggaaccctcagacatcagcaaactaggatgggaacagtcaggaacactgttggtccatctgagccaagcacaagagccctctccagctactcagagtgacagagctgggctagaagaccagttggacttggaatccaagtttcagaaacttaatggccacctaactcccaaaccaagaagctggatgcagcagggttggacctcacaccctgactctccactctgtaactgccatcacacagtgcttccctgagaggcaaaagcaggagggacagccagagaggagaggcctaggcactcccaaggacatgggtgaggctcagggcaaagcaggcccctagctccaccctcttctgtccacaccgcccctctaacagaaggctcagtgtttcatacagacacagctgcaggctgggtgctgacttgaaggctcctggaacccctggcaaatccaatggaaatctctagtgtctgtcccctggcactgaagcctggggactttcatgccccaattctggtctgccctacacatcatatattgggggaaagtcataagaaagcacctctctctttcggctcccacctccccaaatctgctgaaattgcagttcccagaggatttcctcaaagtctggttcttctatccactagagagacccaagtattggggacaagaaaagggtgtgtagagaactgaagccgatgtctgaactacctaaagagctggtaaagtatcctgggtcatggtagggaggatctcaattctgactcatggcactgctgtgctggggacacacacacacacacacacacacacacacacacacacacacacacacgatgcaatacacctgataggaagtgagaaaaggatgggagggagtcaggcctaagagaatggatcactttctcttcctgtaaggaacttgcagtggccagaggaagaagtgtgtgtagtgcaattagccatgggttagtggctgtgagcagtcatgaatgtcatctccaccttgaagctgaagttcctgctttgtctcctttaaacctcgcccagaggagcaaggaatggtctcagaaggcctgcagccccaacactcaaggagaaaacaggaggatcaggatttaaggccagccttgaccacaatagaaaacggagaccaacagatttggctgcaggctcagtgctgacacctcctgaggcttcaggcacccctggcactaatggaaatctccacctaaggctgtttcaaaggaaaaaacaaaaagtcaccaggatattgaaatgtcccttctggtgatgcaaggccttctggacaccaccctgtaggaggaaggactgtgaggaggtctcattggattggccccccacagttcctcagtttcagtgagtcacaccactggcctgcttcttatttcctgctaggctgtccactgtgacctgccctctgcaacaccagccttcacaaactgtcctgtagcaacgcagatgtccccagtgccacataaggcacagggaagccaccctcttccagtttaggaattcagaacagaagcccttctgcaccctgctcctcctctcagacctgcccaaatgtctctctgcccacatgcccactttctggttttgcccagggctttcttcctacctggctgtccacctgaaaccccagaacaagatctccaccagctcccagtgatcctctgggctaccccactcctctctctccgcccagcagtacccaccgtcccagcttcatgcctcttgtccaatggaccaaggccctgctaaactcgggagggcctctccctcacaattgcacagggactgtgggctagaggtggcatctatcccaagccaaatcctcatacagacctggaaggcttctgcagcaccccgaggtcccctgaggctagaattagagaaagggaaactctacagagcaaacaaggacggcttggaaagagaaaacggaaaatatcctcataaatgttcacagagggacattgtcccaaggaagggaggagcctgtggtgcagctgggggtgggaagggaagctcatgagagtcactgtttcaggggcctcggccccaggacggcacctgtggctccccttccctaacagcccagccacacttgtagtcatttttctcttccaggcgcatttccccaggagaatttagtttggtaagaactaagggagggtggatgtggtggtacacccatttaatcccaaggtagagggctacacagtaagactgactcagaaataaaacaaaggaaagaactgagagctcagccagcagaagggacaggtggccgctctgcctcatacagacaccaagggccgccgctgtgcctcaatgtcccccaagggctagaatcaggggatcaaatgcagcaaagcagacaaggaaggcttggaaaatgaaaagagggggaaccaagtgaaggcaacctatgaggcccacagtctcagaccctcagctcttccagccagggtaacctgtcagaggctactactggaccattccctaggcgctcaaagagcccgccgtttctcgccttcccaaaggaacatactctgagagggccggtgggagcacccatcgaggggcagccagaccaagccgagaaggccaaaccagcccctaagggctatgaatgctcagagcaaagtgtgtgtctaggatgtgcagcaaggcctgtgttcacacccttagcaatagtcaccgtcccacatacgcaaatgctcagtattaagccgtctcatttccaaataaaaacaataataaaaataaaaataacaccgggcaggccctgggacacaaccagagagcttcaggacagaaaatatgttcccaggtcttttgcaaaagtccctatagctgtttgtccctgcttggggctgaaagacagcaattccaccccacccacggtctcaggtagccaggtttatcaggtccctggataagttgtcgcatgtggtttcttctctcccggctctcccccctgcccccacccctgcccttctccaagtccccaggtttcctccacctgacactaccagggcaggagtggtcaccagacggttcgaagcccgctctagccgggtctagcctcgtaaggagttggagaaggctccgaggctgccctccaagtcaggcggagagatcggaccccgcagacaaactccacgcagaggtgtagggtgggaaggatcggccacgcagccaagggctgtcagtaagtcccagcagcgcggggtttgattggcacccgctagccacctacccggctagcggcgtccgggcaggcgacccgaggcgtactgcccggtgtggacccctgcgggcgcgacctccccctgctcggctcccctgcccactttacctgcggcggcggtggcgcgccgcgcgcgccgggggagtggtctggccgcacctggcggggcggggcagcgtccccaccacttaaaagttacaaagtgaaactccggtgactcttgcacatgcgcagagctgcatctgcgcgttacctaatttggactcttggcccgcgccggcgccagctggaccgcgaagactgcgcgctgggcagtgagcccgtctgtggtcctctaaccctggtccacgcgtggctgtcctcgccgaggtctacgggcggggtcagaccagctaacgcccacaaggccgggagaggacgtctccggactgcctttgctttgtgacccagcacatccccactgagagaccctgggccaaacctaggatggccgcggcgctggagagtatctgcaaacgttcgtaatgtgggattgaatgttcccaggaacttcacaagctggcccagttggggcgcagtgcgggcgagcacggggcacagcaaacctaccctgcccccagccgtctgtagccacaaagacgcccgccacggtaaggagccgggacctggaagttcccaagcactgtcctgccctaaataaagtacagcatttctagcgttctctgggaccgcacgtcactgctccggcccgagccatcagcgttgccaactgaggccaaacatgctgagcaccccgtgagttctggctgggacttggaggtttccagcgaaccaggggcccctgcaccggctttgcctgcccctccccgccgagggcaggaccgtcgctggatgtgctaggggaatagagtgagaattgtgcagggcctctgctgcaaactacccactttcaggcctcagtttccacaaggaaaagggtggaaccgaagctcgctgtggcgtccttgccagcactaaccaacttcatgcctaaagcagctccccaagaaacagcttcgcccctttccctgtcctcacttccatgtgtgagctttcatcttctactgtaaagataaaagtatcctcgcagcctccctgtccctgattctagcctgcggctatctgaagcagggtgtctctttcctctcccgattctcctctgcctctgaggagcgcctggctaggagttatttcccagaactttcctctgtccttgtcttcccttagctctgcctggccatgcccctgctccgctactgcccttgttcaggaccccacagctagctagctagctggcttctctagatccctggttgtagtgtcccctggttattcccccggctcctcagattgcttctctctgttctcccttctcctgctcttgctcctgctccacacaatttcagcctttgttggtgatgctgacatctgcctggcttgtgtcctggggtccagccccagtcatagtaagatgggggcaccactaccaaagaacagagcagtttagggcccttgataacggaaggaaagtctttctatggctgatcttcaggtggcagttgtctcaaagtccagagaaggctgggttggcaaaatgtaacaaaagcaataaactaggagttacagatgtagctcaagttggcagagtgcttgggtagtgtgcatgaagcctacatttgatcctaagaactacataagccagccatagttgtacacgcctgccatcacaacactcaaatccaaggtctaggccagtgggacggctcgggggtaaaggcacttgccatgaaagcctgactagctgagtctgaccccagaacctacagttttaggagggaaccaactcccaaaattgccctctgacttccacagcacatgctggctggcactcacacactctctgtctctctgtctctgtctctgtctctgtctctctctctctctctctctctctctctctctctcacacacacacacacacacacacactatttaaatttaaaaaatatttaaggtcatctttaactacatatggcattggaggccatcctaagctacacaacactttgtctcaaagaagtaataatacttaaataaaaatgggcagctccatagtgagaccctgtctaactaaataaatctggggtgtgagttggactagcctggatgcacccagtcagtgtgcaaagtaattattaaatcattgtttccttaaaccaaaactgtggaggttaggggttgatcctatctcagggatcaagatgagaaggtttagagcacagactagaggatacagaattcttagctaacagccatgcagactggcaaggagactaagaggtcccttccctggactgagattctgcattgtttatttctttgaagtctgttatagacaatgatgtgagtcatgatccctgtatcagtctgaggaatgaaccctgttctcctagaattatgaatgactttggttttggttttgttttatcttgagacagggtttctctgtgcagccttggctaccttggaactggctctgtagaacaggctggcctcaaactcagagatcatcctgcctctgccccgtctcaaaaagagaaagaaagaaagaaagaaagaaagaaagaaagaaagaaagaaagaaagaaagaaaggaagaaagaaagaaagcccaaacaacaaaagttacggaacaaaacatatttattcacatctagcaaagtccatattacctaggttgcacatgtttgatacacttgtgtcttaggtccaaagtcaaacctggggctcagcccagatccagtgacaggtttaggaattctgtccttagcttacagcaactatacatgttaagtgctttaacatacagtgcagtgaacaatataaagagcagaggcaactaggtagggccccctagtggccagtgagtcacattccttgaaggggttaaggctggttcagaggaagcaaatacagagctcagcacagacggggcattagcccatccgggattcagaatccccagctctgctggaacaatagaacacttcagatatacacgaaagtcacatcctcggagaggccacagtctgtgcctatggctccagcctcctgggtacgagcgcgccatcggaggcacagctacacctctgcaccctcatgttgggcaggctgaccacctgaggcctggtcctgcctccctccttcatgctgacaatcacaggcagggaggtcatctccgaggcaatgcactgccgtggccccagaaatggccacttgatggtcagggactctggcagctgcaggcagctgcccacacactcatagaccaggaaccccgggggttcaaggatccagttctccgcccacttcatcccctgcaggtccagatacatctcttgacgacagcatcgggtgccttcagtcacgggcgcctcggggccacaattgccttgagctctgtgagaatgagataccagtcgtcaactgagaaggctaaaatcagggagggagacttaagatccagctcgccactggactgggcagtagtggcacaggcctttgatcccagcactcgtaaggcagaggcaggtagatctctgcgagttcgagaccggcctggtctacagagtgaattccaggacagcctccaaagctacacagagaaaccctgtcttaaagaaaaaaagaaagaaagaaagaaagaaagaaagaaagaaaggaaggaaggaaggaaggaaggaaggaaggaaaagaaaagaaaagaaaaggaagggaagatccagctcttggggtattcaagaattaggctgggtgtataggagagcactggcgtgttgtgaagtcctgggttccaaccctagtgccacagcaaagaaaacaactgaattggacatttatgtggggatgggtagctaagaactaaaaaaaaaaaaaatcaataatatttactgggggtttcctaacagagggatttttctaaatattttcacactctgaaactttgtcatttcacagttaggtcaaattccccgtttgtctctcgacttcgcttatcaatttaacccacagcgcctacccgtaatccttgaggtccagcgtgtgcagctccagctgtggctcgccccgcccctcgctgcccggaatcccttgagcagcaaagcgaaccaacttgtgagcgctccaggtccccgggcccagatgctccctctgcaccgacacctgcagcagcagtggctgcctcggtcggttcagctgctgccagaagttcacagcctcggtcacgtcgaaggccttccaaccgctctcgtggatggacacgagcctgaaacacagctgagcgtcaggcgaggggactagcaggctgtcagctaggctctggaggggtctcccgtcccgtgctgtccccactccatcctccgcagctcccctgtaccagcagggccaagcagacctctccccaattcccccagtgcgcacacacacatacacacacacacacacacacacacacagagagagagagagagagagagagagagggtgctggggccaatacctggagtcgatgagggcggtgcggttggaaccatcttcaaggaagcgtagccactcaatggtgacccgagcgcgggcactatgtggggacagcctcttttgcctccggtgagcagttctggggactggctcctggaagagccgcagcacggcctgcaccagctcgctattaggtggcagccgctgctccatgccgaacactagcaagtgtgtggaggtctccgacaccaggaacctgcctgccacctctgtggacatggagagagtcagaccggcctctactggcaccagataaccaccagggcgacaagactcaaggccaaaattccttactaatccgcaggaagagctgggagcaggacgcccttggcacacagtgaaaatgaagtactccctatctaggaattatagattgcgttgaggccctgaatgctaaaacaattgttgaggttgtttcttttttattatcaacttccacccctgatggtggctttggaaccctgtgagactatagcaatgtagggtcttttagggagggttgcagaagaaggtgggtggggagtacagagaggccacagaggtcagagaatggaaatccaagatcaggagtgcaaccaaaaccgtgcctttattaccaggcagactctgagccggcagtggtggcacacgcctttagtcccagcactctggaggcagaggcaggcagatctatgtgagttccgggccagcctggtctacagagctacacagagaaaccctgtctcaaaaaatcaaaataataataataacaataacattaagtggcagactcttgtgagagtttctgctcaatggcgcatccatgagagagtcatctctattacctgttcacaaccagcatccttatgtcgctaggcctaggagagtaagtttgtggctgtggctgtggctgtgccccagggctcattccatttggcggtgctaccatgctggcccttgctatcttgacaactgaatacctgtgtcctcactcttccaaactttctgttacccagggctgcctctacccagtcagctgttctctgtccgaggcaagacatagtcagccactcttctaggtgacgaccccaggtggcctggacctctcctgggaccctgtttttctccattctcctcctcttcttgctcctgaatttaacagcaagctcagccccttttccctaatcccaagcgtccttaagtgcacagtcaggtccccagcgcccagacccagccaccctcccagacctgctccttctaacaaccccctcagactgtgaccccaagacttccactctgagccccacaaagcaaggacccattgacaccacaggtgggagggcccagtgaacctgtctttcctagagaccttggacaagatgggagcgcttacctctaaagttctggctgaaccttttccctcgggagcggctggcatggctgtgctgcagcagagcaacatactgggccctcacatgggaggggatgactaacccctccacatcagccttgtccaagacaggcggctcactaagctgcagctgttgcagtaggctgcccaggacctgctctccagtcagagctgcccccgggtcaaccagggacagtgcccagagtgcccagcagagccacatgttgcttgctgcccaggagcgagaggagctgtgagtgtgtgtgtccctgaggtgtcctaaaagggtcttgagtttcctgagggctggtgcagaccaactttatagctggccctggggtggggggtgggaaagaaggaggagagaggtcacacccctgggacctcctgggagctcagcatgcagcaagctgctgagccctgaggaggggctgtctagaaaggacacaaaggcctgtctggactgagaacatctggtcactactgtctgtttcatatgcctcaactttgactgaagggtgcctgaccagttaagacattcagggtgggggcagtaatagctcagtggtagagcacttgccctgcattcatgaagccctcaattcaaccccactaagggctgggaggagtcctggagctgtggagttctctgctgggtacctgttcccagtgtctggaatgcacacctgtagcgttgttcattgctactcctgaaccctggaaagaaccaaactccaatcaacatctgagctctccaaccgacttgcctctcagtacaccaggccaggtgttcaaaagacttctggggctgattagagccagcatggcccaatttgggtagaccttccttggccacgaagcctgggactggccagtaaggagccccatccttacctttccttgccaagtccaccctctcccaatttttgagccaagagaattgtggctcagagaaggagcaacataaagaccagtgcccacagctgagcagtggtgcacaccgctaatcccagcactctggaggcagaggcaggcaaggccaggctggtctacagagcgagtgccagaacagccaggactacacagagaaaccctgtctggaaaagatcagtgcccacatagtcagtgctttcgatacttctggttatacttcagagtctgctaagccttctccaagacactggcaagacatctgaatgtggatttgtgagctgcttgaagatttgtactggagaaataaaattaagcaactcaccaggagtagggctgctaaataaaaccaggactggatttgtgacatgattacactaatagattattcattgtttacctgtgatttgcattacaccagtatctagagtttttatttgcggattctagcaacctcggtcaggggctaaagagaaaagccatagtggattgcaagacctgtgggtgtgctccatggctctccagcaggaccaccctttgttatgcagaagagcagctgtctccccaccactccggcctgagtctgacccaggtcaggctggagattggaaagcagtctccaaacctggtctttggcctattccaggaaaggggactcctggaatgaagcctggtgtcttccctggctctaggccagtgttcagggcccagggtaaggcagtggcccgatcatgccaggaatgagggaaggctcaggtaagggagaaggctggtgtccccccagtgtcaccaccactctctgactcctatgatttgggctgccaggtgagggctggagcagcacactgcaatgggaagagggcgtcatcttgggacttcagagcagagaccatctggagaaggatcagacagcaggacctctgagatcaaggaagccaaagtccaggacaatcttttcaggacagctccaagtgtctggggtcccctcactgcgcagggacagaaattttgtgtttgtttaacaagtacaccaaggctggcccagatgccacaggcagtctgaccgcacatcatagagcttcctaacctgtgcctggggctatgtggcctctgggaggcagggcaggggacatccagacctgccctgggtggtctccctgttctcccagagtacctcaaagtagacttcctaggtcaaagaggaggacaccaactgcatttcaggccattgtcccttctgcttcctgcccgtgggagttcacacactgctgcgccagagtcacaagctgtgtgggtctgcagacttagacccttctcaagagatgtgagtctcctcggggaggcgctttttacaccagaaattagtccaattaattaggatgcccacagaattcctagtaagtctcacagcaggcactcaagaaatgctaactgccagacggtagtggtgcatgcttttagtcccagcactaggaagacagaagcagacagagaaaccctgtctccaaaaaaaaaaaaaagagagagagaagaaagaaaagaaaagaaatgctaactgtcccttgcactgttatttgagttgtgagctttctaaaatgtaagttgacttttttttttttactcttttgaaaataattagaattcaggaacattcaaacctgtggaagggaacatgggaaaaggcaggctcttcccttgctcctgcctgctcgtttcagctcgatctctcttacaaaaatcatgaaaaggcttccctatcaatcagagtctactaatcattatttgcacaatgtctttaaaaagtataaaagttttagtttttttttaaaaaaaaaaaaaaagtcatcagccgctgggtggtggtgacgaatgcatttagtcccagcactccggaggcagaggcaggtggatttcagtgagttggatgccagcctggtctacaaaaaagagtttcagaacagcctccaaagctactcagagaaaccctgtctggggaaaaaagtcatctttacagattggggcggggtagtgttgtttaatcaggttttctgttaggagatttgtgggctataagtcagggtatgttctgctttgttcggtgagttggtttttttgttttgtttctgcacagtgctgggactgaacacgggggtcttcaggatgctaagcatgtgctctgccatgagctatagctcagtcctaattttattttattttattttattttccagacagggtttctctgtggctttggaggctgtcctggaactatctcttgtagaccaggctggtctcgaactcacagagatccacctgcctgtgcctcccgagtgatgggattaaaggcgtgcaccaccaccgcccagctcttaattttattttaagagatggggtttcactgtgttctactggctagctgccaactcctgaatctaattcagcctctgcagcaggtggagagtgtgtgggtcaccatacccagtttccaattttatatttttcccaagctgtgtgtttatatattttttaaactttttgttgtttttatttatttatttgggggtggtggcacaggttttggtatgtaagtaaatatcagagaacaactttcaagagttggttctctcccctcaccacgttggtcctggttgttgggcgtggtatcaagcaccattctccattaagaaagccatctcactgatgcacattttaattttagaagctttgtatatgcatatagtgaatattgagcaatccctccttgcaccctcagtacccacacccccctctcccttctctcttcccagtggtcctccttataaccctagacagttctactttcctgatctatgtgtgcatacgacctagaagccaaaatgagagagaagatgcaatctctgtgtttctgagtctcatttaattcccttaacacgattatctgcagttgcatccatcttcctgggaacatcgtaacttcatccctcatagctgaagaaaactctgttgtgtatacacaacacattttcctttctgtccctctgttttgagacatcagggttggttctctgactcactgttgtgaagagagctacaataagcactggtgtgcaagtgtctctgtgctgagtcaacctggagttctttgggcaaatacccaggaaggctctaactgagtcatatgggaattttcctgctttgttttttttttttcttttcttttcttttcttttttgagaaacctccgtactgagtttcatagggatgggacggctttacatccccaccagcagaggttaaggcttcctttttcatccacgacattttcaacatttgtcatttgttttctttttcccccttttccttcctcccttccaggtacccttctacccctcctacagccttcccaccactttcaggttttagctcctttgtttgtttgtttgtttgtttgtttgacttttgttacagagagagagagagagagagagagagagagagagaccctgtttttgatgtttgtgtgtatatgctttcagggctgaccactctgcagtggataaccaggggtccatcctgggagaggttaactctccctttcggcaatcagcggttatatgcagttctttgtctagggtggggccaaatgaaaatttaacccttccatgctgacaagtccccagctttatattttaagcagtccagagcacagcctcgcccacccagaatcccctcccaggggacagccagcctttggcagatgggtcctggaggtttacttgtttaccctgacacttagcctcaagctctgcaatcaaccttatcctggctgggagtcaggtggaaattgagacacattcatagcttatttgattatttgtttgtttcagtgctggggatggaatctagggcctcctgcatgttagacatgtctctatttcctgatgttagcaagcatgaccggacaggaagtgctaccgtaactacggactataatgtggatttcctttcttttaagattcatttttaattgtatgtatgtgtctgtgtgtgacctgtcgaatcaaggcttgggtcctttaagttcttgctgctatggggaaggggtcttttccccacaggcctgcttaactgttgcttgtatcacagaagttggttattttaccttctgagttcgaacccttattagatcatcttatcatttgcaacaacacttaggtgactcacgtttctaaaatccattgaattttgttaggtacaaatgtaatactgatcaacaatattctgtctctgtgtgtctctctgtatctgcctgtctctctgtctctgtctctagctctgatctgccattggggctctctctctctctctctctctctctctctctctctctctctctctccctctctccctctctctccctcctctctctgtccagtgtcatgttttacaggctggtttcaaactcactgtgtagcccaggatgactttgaacttctcatcttcttgcctctgccctccacacatctcacatggtgctggggattgaactcaggcatgctagacaagtactccattgactccttcccagtcccttgctgatgatatgcatgtttaaattatggccatggggtttggggatgggcacataagtgcaggtgcccttggaggccctggagctggagttacagggggttgtgttcaacctctgggtgggaaccaaactcaggtcctttataagagcagaatgtgctcttcaaccactgagccatccatccacacctgctagtaagaatctgcttcctcttgctcagaatttatttctctggttccctctctcctcctctttcttcctgaactttattcttttggtcttatttttatttatttattttgtggtagtggagaggaagccagagcctctgtatgttgtacaagagctccacaggtcaggtcctttccttctgttgtctgactcatcagctattatctccagactaataccaagtaacgaggatagatatcactgtctcgcccctgatttcaatactgtttcccccactaattatgaacttggagataaatgcattctcatgctatggaaatatccacagtaatttttaaagtggggtgtgtgtatgtgtgtgtggtgtgtgtatgtctatgtgtgtgtgtgtgtgtgtgtgtgtgtgtgtagtgtgtgtgtatggtgtgtgtgtgtgatgtgtgtatgtgtgtatggtatgtgtatgtgtgtgcatgtatatgtgtgtgtgtgtgtgtggtgtgtgtgtgtatggtgtgtatgtgtgtgtggtatgtgtatgtctatgtgtgtacgtgtgtgtgtgtatgtgtgtgtgtgtgtgtgtgtgtagtgtgtgtgtgtgtttggtgtgtgtgtgtgtggtgtgtgtatgtgtgtatggtatgtgtatgtgtgtgcatgtatatgtgtgtgtgtgtggtgtgtgtgtgcatgtatatgtgtgtgtgtgtggtgtgtgtgtgtggtgtgtgtgtgtgtggtgtgtgtgtgtggtgtgtgatgtatatatacatgtgtggggtgtgtatgtgggggtgtatatgcatatttgtgtgtggtgaatgtatgtataatgtgtgtggtatatacatgtgtgtagtgtgtatgtgtgtgtatgtgtagtgtgtatgtttgtgtggtgtgtgtgtgtatgtgtgatgtatatatgtgtctggggtgtgtgtgatgtatatctgtgtgtgggatgtgtgtgggagtgtatgtgtgtgtatgtatatgggtgtgtggtatgtatgtacatatatgtgtggtgtgtgtgtatgtggggtgtgtgtatgtggtgtgtgtgtgtgtgtgagtgtgtgtgtgtgagtgtgtgtgtgagtgtgtgtatgtggggtgtgtgtgtgagtgtgtgtgtgtgagtgtgtgtgtgagtgtgtgagtgtgtgtgtgtgagtgtgtgtgtgtgtgagtgtgtgtgtgtgtgtgtgtgttgggggaactgaacccaggaccttggatatactaaagatgtgttctatcactgagatacagtcgcagctcaataagaatttgaaaaaaaacaaacaaacgtgaatggacactgaattgtaccaatctgctgaatatctggacctacaagcacgctcatattacagttaaagtagaaaccctgcaaagacaccttggcagttcactctgtatttgaagaaactgcgttattctaagatccatcagttgcactgtgtgacatgaataccttagtaagggtgctcactagagtggtgtttcacacgagtctaaacaggttggctgtggctcagagggctttccaggcatgcaagagagcccggaaacccaacgaagtgtataaacggaagcagcctaccagaaatgccttgcaacagtgtaaaggaaaaataaaatgcagtaaagtctctgcatggaatattctatgacagggaagacaaaccaaagctgtgcagtgttggccactgcaagaacagagccaggaacagaacccagacacaaacagtgtctgtgctcaattatccatcaccccaaaccaggcagaattaggccgcactgtttagagccacacttctctgcagaaggtcagggagtcaattgctaataaccaccattttgctccttttttcctatatttaaacctgtgagggtttttttctacatttactcactttgggaatttgcagtcattgagcacaacttttttaggcaataatttaggttttagagcacctaaggtggaaattataaagtcaccactgccactcataatcaagagtcagcagggccccaaaaggctgcattctatccctgcccaccccacacgctctgcccgcccagtccaaagccttgtccttgaccatctcatacttcctgcctaaggacatcccggccctgtccagggctgttcgtaaccgagcacatggctctggagaacccagcttcttttaggggagcagtgtatgtttcaagccaggtttctctgtttaaaggctctggctgccctgaaacttgctttgcaagccaggatggcttcgaactcagaaatccgcctgcctctgcctccccggtgctggaattaaaggtgtgtgacaccaacacttgactgcacccagcttcttaaactgtagtttgcaaccccacttggtattgaatcacttaatgtagggcatagggctggggaaatttggacaagagtaaaaagtttctgggcgtcctatgtacaaaaattaatttaaaaacaagtgtgtagccaggcggtggtggtgctcgcctttaatcccagcacttgggaagcagaggcaggtggatctctgtgagtttgagaccagcctggtctacaagagctaattccaggacagcctccaaagccacagagaaaccctgtctcagaaaaaaaaaaaaaaaaaaaaaaagcaagtgcatgatgaatctaaggtctcgctctgtcttgcattgtatgcctctgctgcaggcgtggatctgaacaaagatcgagtgcactacacgagttgtcacagcccatggttccaacccccgctggaaatacctcaagtctgggtcaagactgcagtctgctatgaggtaaaagtgtgtgtaataggaactgaattcatgtcctcaggaacagcaggaagcattcactcttaaccgctgagccatttctccagccaggaattcccaacagtttcttaaatgacccgaaaatacgtttgccattttgtactacatatttgtgcgacattgcattctcggtgctgacgattataaaatcaaaatagactgaggatgctctctgccctgcattatcaaatacccagctgcagtttgttctggaggacacgatggctttacttttgctccttctttttctccccattacaaagctagggagcagcctgtccccagacaaggtactggagcctggaactggagagtcctaactccagagcctgctttcaacaagtgtaaacagcatatgacagctcactaatctaacgcacattacttgtgtatactaaagaattgtattaaaataaatagctttatgattactatcagcaaatgtttgatttgtgcatctattttatatccctgaatacctggggtcacataaaaatgtcttaggcccaagtggaaaaagtttaagaagctctgctctaacaaagcagaggggtgcccctggcttctcaaacccccggattcgtgcacagtgccgaaacccgtgagtgtcctaagacctccagtgttaggaccatgtcccaaccatacagaggtatggagagccacaccgggctcagtgagaacatccatggaaaaaggaggaaaaagagaagaaaagcccttaaagtgtacctttaaaacagaaagggcaggcatggtagtgcattcctataatctcagcactcgagaaacagacagaaaatcagtttatattggaggccggtctgggctacacagagtgttctgggcctatgtgagctacagagtcagatcctgtctcaaacataacaaaacaaatagacgaaaactcccaaaccaagcaaacagaaataaaaaacaaaacatcaaccaatcaaagggggaaaatgaaacagcaaaagccatgtcatgactacacagggaaccggaaaacccaagctatggaggagctgctggtaccccagcctggacagtgttctgtggcacagccacacacctcctgctgctcctcagcctgtgtggccctaatggaaggcatgggcccctgggaaccgtgtggtggttacccaccccacccccagtccccacggtattacatgggcaaaaagatggaacctcggggctgggaatatactggaacaaaataaaataaatacaactcgataccatcatcaccctcgggcaacaaggacactgttgggaaatgatcaaaatgagccgtagggagcttcaggcaaaacctaggttcaatcccagggatggcataaaactgggtatggtaatcccagcactgcagatccattacaaagcaagttcaaagccagcctgaactacatgaaaccctacacaggtcattgagaagtcgttttattttacatatttaccaaacacagaggggggcaaagacaggaatcaaacgcacactctggtttctttgtgatttgtttgctctctctggggctttagtcacacctcagttgcacctgcaggcaaaccacttcccattaaaggaaaccctcaggggagtggggggcggggttggaggcctacgggagcatgctctgcattactccccatggctgaccccctgagggatggaccctttcccccttcagcactgcaagctacagactccatcttttccggggtccacacgggggggggggggcgtttctgctcagaggtccaaactccctccaccctgctttcacagagtacttggagaggggataaggaaggggtggggggggggttgagggtgagatatagctctgtgaagaaagcttgcctagaatgcccaaggtgctgcttccatacctgtatgctgtctgtctgtctgtctgtctatcattctcttatctgtctccctaacctaccccacccaactaaaaggtatgtagggagaaagaagataacttaaggtggtttctttctctgcagaaaaccctgcaagccctggtcttctactcttcctgcctccctttctcttctatcaagtaagcaaatatttcttgatgtttgtgtgccttttgaggcagctgccaccacaggcatccaggtgcgtgggttgatgaggtggcctctgcagtgtccttacttccaatctcctttactctgccctcaccctaatgacatttcactgagggccagttctacctaggggaccacagatgtgttcatcagcagcctgtgcctcagtttccttatctgtgagacaggggccttaatggcatctctgagcttccttccagtcctccctgcagacgcttgcctccctttgcctcacctgacaagaggacagaggtccccaggctcctcccaggtcacacatatctaggactaaatccaggattcacagctgtcagaaagaggaaggggcctcgtggcttgaaacatgcatacccctattcctgccttgtcacctccctccttgacccagtgaaacccaaataagctgagctgctctttgggagagcagtgagcccacccagggtggatatggagggcccacaaggctctgggctagggtcaagagttccatagtgagggactagggctgaggctttccaaggcgcctgggctggccttggtgcatttgttcaacaggaacaaagtgtctgaccctgcccaggaagggaacctcagtcgctgactctagcctagaaggaatgcactcccggacctcagcttgcatggcctcagagccgcatgcggatctgagtcttgtctagctgacccccacccggaaggccccagtggaccctgaccccacattgtgccctgacactcatctggcagcctcacctagtattggggtcaaatctctcaccacccccacctcaagcccaggcccagagctgggccctcaatcagcactagtcaagtgtcctcttacagcccattctcctgccctctccttcagggtggcagacttggtttcagaataaacccctagtccggtctgaccccaagataccagacttgcacccaccgcatcctcagggcagcaggtctggctcctcctccataacaaagggcagtctccctcccacctgtcacctaaccagcccattgtgaaaaaaccccaatccacattcacttcttctgggtgattggccaattactggatttccccgaaggctatttggaatccacattcaggaaagagatctgtttgcaaaggaatatttgccctgtctgctggcctcatcttctttaacgatgtgtggcagaacctccccttcccctggccccacaaccctagtctaaactgcaattgtcaacagctggaggtcttgggagagccaggtctgaggctgtctatgctgagctgggcttctcctctgggccagaaccatatctcaaatgttctctgcccctactgccttgtttccaacttctatattcagctaggcccccagacctagagtgcttttagggttcttcctacctggcaccctctaagtccctccagtctcactctctccatttgagaccccccaacactgactggtacctggtaccccctaagtccctctggtctcactctctccatttgagaccccccatcacggactgggctattgcccacttactctgcctcccacctccagcatagtaatgattttcaaaaaacttcaattataaaatgagctgcattactcaaagccctccaaaaataaactcaaagtgaactgtagaaagcaaggcattgtaatacatgtttgtaatcccagcactgggaaggtaggaggcaggaggaccaggagttcaaggccatccttggctacataatgaactggaggccagcctgagctggctatagtgagaccctgtctcaaaaattcaaaacaaaaactgagtgtggtggcatattcctttagtcccaacactcgagagacagaggcaggaagatctctgagttcaaggccagcctggtctccagagctagttccaggacagccaggactacacagagaaaccctgtctcaaaaaaagccaaaaccaaacaaacaaaagttcaacacaaagatgagtatagtagcacacaaccattaatcccagtacttgggagacaaaggcagacaaatttctgtgagtcttgggctagtctggactaagccagccagggctacacagtaagctcatatcaaaaaaaaaaaaaaaaaaaaaaaaagaaagaaagacctgaatgtatgtatgtatgtgtgtgtaccacttatgtgcttggtaactgtggaggtcagaagagagagttggccagagagatggctcagaggtaaagagcactggttgctcttccagagtcctgagttcgattcccagcaaccacatggtggctcacaccatctataataagatccggtgccctcttctgtggtgcaggcatacaggcagatagaacattgtacacataataaataaatcttaaaaataataatcaggtgtagtagcacactcctttaatcccagcacttgagagacaggggtgggcagacctgtctccatagtgagttctggaccagccagagctatatagtgagaccctgtctcaaaacaagaaaaagaaaagaaaatagaagatatatagaagataacacagaagaaaatctagacaattaggggtctagagatgacttttcagacacaacaccaaaatcaggagcaactgcagtgtgtcagacctaagaggcagcaaggctcttatgaagaaagccaggaagacgctcttaaatgaagctcctcctcctggcctagtcagagctgtgagtctctggatccgggcctgggccaggaagaaggggtatcacccacagacgcaggggtaaggatatgcagggaaggggatagaaacgagaagatgagcctgagcagcccacgggaggtgtccaggggatcacacccaggggcctggggaggccagctccgggaggggctttggctacatcagcagcagagcaggaggggaccccgcagtgctggtgatccagacagaagtctctggaaaaataactagtagttagatccttgagggagagaagaccaaagcttgatgggacagagaaccaaaaggaggaggagagaagagacaccccactctagatagttgcaggcccagacatggaagagaggtcagaaaagcagcaaggctgtgccttggggatgaggagctgctcaggcctggccatgttagtgctggcaaggacccgacagcaggccttgatccacactcttgagagtgtgtgttaatatgcgcacaagttagtgcatgtgcatgagttagcgtttaaacatgtatggctctgagtgtgtaatcctgtgggtgcatgtgtgcgtgtgagtgaggtctgtgtgtaactgagtgatgtgtgtgaatttctgtgatgtatgggcggtatgtgtgagtgtgagtctgagtgtgcccgtgccccgccctggctactcctgactaagggcagctgggaaggtgagacaagctctgggattgtgccatgttcacacagcaggctcatggtccctagacaatgagatttgtgctaatgttaacgaaaggtaatggtccctccacttgttagatcctcttgcctcatagctaggggctttcagcccccagacctttggcatctcacagttccaggcaccttggcaaccagaaaagagcagccaaaggcagcttctacagggaggcatggagaaagaaaatatctagacaacatgagcagagtaggcggtgggtcctaaattaggcaggctgaagctccgggtcatttattgatgctcacaattccctttgtcccatatgtagcctggctccaacagaacccggtgcactggagggaaggactcccctgaagaaaggtgcctgagtcccacctgcatttccagctggaagtgattggtgcagcagcgccctctgcagctcaggaggagccttcacacccactggcgatctgggcgaccacatcctcctgagcatgctcccatttctctaaattccagaacatatgctcacttccccctgccacctgcagggtcaaacctgacctcagctaacctcagagcctctgtgcggcgcccatcctgacagcttccctctctgttcccagccttcattcatcccctgagtctgtatggtttgtctgggccgactggtccacctgaaatagatgcgctgaagcaataccccagtacctcaggatgcatctatctggagataaggctacacttagcgaggcatcgagggtggtccctcaaccaagatggctggtgtcactaaaaagaagtcagtagagacacacagaggagggaccatgagagaaagagatctgcatgctcagaaagcccaatcccactgacgcttgaatgtcaggcttccagactgcaggacggtgagaaaatgcatgtctgctatgcaggctgcccacctgaggtgcaatatgcaggaataaagccctaataggccaccttgcacaaatgtcagctagacaccaattctactggtgctggcttgcaaccctacttctggccagggccccttctgagactctgtctccatctccatctgacccaagtagaattcattcctaatgcaaaaaccacaaaaatcaaaacatccacctgacaggcaaagggctcagccctcggtgacaggtctgccacccagggaagtctgtgactgttaatgcttttctcagcggtctcagtgttccacaggttagtttatggcagcacagaggggctgagggtgtggctcagtgatagataaatttagtattcttgcatgagtatatgcgcacgcacacacacacacacacacacacacacacacacacacacacacaggattgaggggcagatagagaaagagaaaaggaaaaggagaaggaaagaagagctgggacagagcttggtttgaggcccgcacactatttccctctcaccttgcccgcatctcatgctcaacaatccccactaagcacctgctaagtgccaggcattgtgctctggctgagcacacaatagggacactgtggacatgtggtattaacttgtctttgcatcacacagattggctttgaaacaatcacttgctttgggctctgctggcggaagccaagggtccttcggttttgttaattacacttcacctggccctggcctttatcgcccagatggccgcaaggttccagttaagggtacccaatagagttttttccaccatcccccatttaaatttttattcatatgtttttatttattgggttttttgttgttgttgttcttttttttgtttttcctgagacaagttcacactttgtagccctggctagccttgaactcacagcaatccacctgcctctgcctcccaagtgctgggatgaaaggtgtgtaccagtgtgcccagcactaaaaatttatttacgtaaacatacaaagcagtgggttttattatggcgtttttatgcatatctatcactatattttgtttttctttctttcacgtgtgtttatcatgtgtctgcacaggcttgtgtgggtgcaggtgaccagaagtcaaactcaggtgtcttcttcggttattcacctcattttttcctttttaagattttacttagtgtgtgtgatgtgtgtgtgttcacatatatgtgcatgggtacaacctgggctgttggtccttgcccccagcttgtctgagtcaggttctctttgtgctgttgcatgtcccactagctgacccgcaaactgctggaattcatctgtctcggtctctcacctcgctgtaggagtgtggagatgaacacggcctctggggattcaaacacagtcctcggatttgtatttgcacagcaaccaatttatccacagaactctttgcagcccccaccttgttttttgagacagggtctctggattcactgaagctcactgattcaactggccagcaagcccagggcccctcctgtctctacctccccagcagtgagatgaaaggcacacctgccatgcccagttttttgtttgtttgtttgtttgtttgttttgttttgtttttcataggcgctaggcttggagctcagctcctcctccctaattgccatttcctgagccactcggttagccagtgcttccctcctgtctactctcctaggagtgcacctgtcttccgtgcaggccccgcctctactggccacccccaaatccagcacacatatgctattcattcttcactctccaagctacttccccacgctgtcttagccacttactttgccatgcgctgtaaaggccccttatctttgcagacctgtagagttctgaggattcggtagaggtgagatgtctcttgcggctgctcctttacttctctgcctttcagcacttttcctcatacctgcccctctccctggctcacacaatgtccgccaagctcactgagcactgaacaggcaatggtttttctgtatctccattttgtttttctcacctatcgggatctacattagaggaagccatcaggtctgggtgttcgcagcgccaggttgggcacatagcaagtactcagtgtgcgaggaatgaacaaatgcaggctagctggattacagcaggtgttccttgcatccaatcttcccaattcagaggaaggccagagtcacaggaaggcctgatttgtctctgtcatcttgcaccccccacccccatcttccttaccctgagtcacgtggatctctctttactagccactatttcctttagctggtcatggatgtctcaggacgatgacatcataacacggggttgggggcggggtggggagactggcatacagtactttgtactttatgtatctatagcaagatctgaagagatgcatatgcattgcttattttgtagggatttctccctggccttagtcagctttctgagaatgttggctgccagccacagtcagctcaattcaagttaataagagcttgtcaggttcctgagagcagtgtctagcaggggctcccacacatgcctgaggattcaacattcctatagggccctcaggaactctgaggtttggggtagcgtctactgcacttaaagaggcagagaatataagggggaaagccgggtgatcaaaacagcacattcggggagcagcaagtttgggagcaccgtgcagggggagggtgatgtgggtggagatggcagtaatgcttgctcagtgccctttcatctcccatcaacaaaaggggaggaagccagggctggccggtggcataggcctataattccagctactccagaggcagacgcagcagactgggacaaggcctgcctgggcagatcactgaaaccctgactccaaaaggggaaaggccctgtgcctaatagaaatgaggccctgggttccaacccaaatgctgcaaaataaaatttaaaaaggcagataccaccgcagggagccgggccacgggccaggcagcccaaagccatggccctggttctaccacctgcttgccagactttctgcgcttcagtcttcttgcagattataaccaaacagcactttcgggctggagagatggctcagaggttaaaagcactggctgctcttccagaggtcccagcaaccaaccacacggtggctcacagccatctataatgagatccggtgccctcaggtgtacatgcagacagaatactgtataatacatacatacatacatacatacatacatacatacatacatacataaatctttaaaaaaaaacacagcattttcaagttcttatggctcatcatgcctgccacacaccagatctttgtctcctttaaatcccagcaccagcagggagagccagtgctcacccgagggtgaggacacagactcaagaacttggcaaggcgacctggtaggatatgatctaactccctgtgagggactggcgaatgctccttcagatgacctggagaggctgggtacagtgagaaactgatattggcaggacactctgtccaggagcccagaagggatgctagcttgtgggtccacaagagagcagctgcccagctttacagccctggtggctgctatggcagaggctagaaggaagcaaagcataaacctgggttttcccctctgcagaacactgaacttcatagcggaaacaagaagtcacccgctgccttctccctatcccctaaacccagaccagtccaggtctggctccagagcccttctctgcgctacagtgttggagcccactagtcccaagcaccttggaccagccttttctctgactcgggacatctctcctatgatgaagccctgccctctttcctgtatatctcatttctgtacgatgtgtgtaacctacgggagatgtgcccgtgtgtcacacagcacacatggcatccagttctctccttccacctttatgtagatgccagggatcaaaactcaagacattgagcttttcgttgccactgattgaagcagagccttacgagtactaaatacaaactctctcccactcagccacatccctagccttgccgtagccactttgatgctccatctgctttactagaaaagcacagcacaggatgggctgtaaagtgttggcagacaaagccagtcgagccacgcccttgggcacaagtaaaaactccccagggtttctctggagcagtgcttagcaacagccacgtagggctgcaggggatgggagagggtgtgtttgtatttctgcaccccataaaaggagcagtggagaaaaaaaaaaaaaactgttaaatccgtctcttttctccctccttgctggggatagaagccagggcttctgcatgccagataagtgtgttactattacgctacacctccagccccaaattgctcagatttaactaccaaaatcatgcctgctaactgcaagcaaccaactaaagcagaataaagggagtgagacagcaagtcaacttcaagccactgccccagaggatctactgttatagccaggcagagctgcttgccccatgtgaggaaaaacaaaacagagaaaggtgtcactaggtaaacatttttttctggggccctcagaaaagttggggttgaaggctacgttaggtcagctcggggtcctgtgaggacaagggaggaagctaggaacagggtcacttgccgtctgtctgtgtggacagtgcactggccttggcatcctataaagtaaagaaaaagacacatccttcccctgacaatgaggacccctgggcctgctgacactgggggatgtcaccagactttggcccatccaagggcacacctaaccctggggataggttttgtcacttcagctctcagggcctggctcttcacccctcatccctccttcctacccttggcccatcctgctgccttacagggaggcccagaacataacagatgtggtttgaatgagattgcccctcaagtcttgggaatttgatgtttggcccccagttgatggctgtgtgggaagctgctggaggaagtttgaccacaagggcaggttctgaggcttcagagagttaagccgctctgctcctgactatggttcaacacatgagctctctcagccgtttgtgctgctatgcctctgctccaccatcgtggactctaaccccccaaaccacaagcacaaaatcaactgtgcctcctctaagctggtcatagtgtcttatcacacaatgaaaaagtaactaccacagtgacacagaagtaagaaaaaactcaaggtggtggcacacacctttaatctcagcacttgggagaccaaagcaggtggatctctgtgaggtccaggccagcctggtctacagagtgagttccaggacagccaggactgtttcatagagaaaccctatctcaaggggaaaaaaagaaaaaaaaaaggcagaggcaagaggataacctcaaatcgaggtcagcctgggctacacagtgagactctagctcaaaaataaataaaatctttattaaagcagctagaacttggcagtgaacatcaccttccaatgggacatctgtgaaaccagagttaaacaaaagcaccctagaattctccacactgcaacactaagtcacttgcttcttttacatatttttaattcagagaatggtccttccctctgtttcttctcttgaggtcaaattgaaccacccctggaatctaactaaagttctccacagttctctcagctgaggggggatgctaacacagggcctcccacctccctcagagaggtgtgcaggaccacctggcttcgggcatcagatgcctctccagagcaccttctgctgtgggacaagagaaggactctatgccactaagtgaacagatccaagcagcttcccccgccagacctaagcttgaccgcccctgcactgctgaggacagggagaccccacaccgcactcctcagtccttcttgcttccctgggcggggcttctcgtgagcagcttccctgagctgggtggagccagcgtggatacggtgggggactccagcttcactctgtccaggagagtcttcttaagggcagcaggggagaccttttcctggtcagccatggactgcagctctctgtagacaaagccccacggggaacatagcaaaccttagagctggagctttcggccttctagccatacaaccccagaacctcaacctgacaccacccaaactcagaatcccaaaccaagaaggctccgagctcctcaagagtcctccataactaagcagggagtgtcacagtcactcatgagatccaagctagacagcaccccagtgatattcaggacccacaggaaagggagtatgggaagttacagggtttgagctcaaagtttcaggcaggcaggagttgaatcccacctccatcatttatccatttgaccttaaattctccatctacaaatcaaagttaccagagctgtggaaagaaccgagtgaagtcaggctaccaaacccttagctcaagaaagtcaagtaagctgtggtcaccaacagagcacagactccaacgacatcacccatgaggtctaagcagagaagaaaccagcacaccgcagggcaggctgggaatggaagaattcaggcaggggagagcgtgtcatacccaccttgttcggatacaggaggcctcaacggcattgatgagcagagagcggaagcccccactctctaggaagtgcagggcatggatggtggcccccccaggggagcagacattgtccttgagctggcctgggtggtcctccgagtccagcagcatcttagccgctccctgagacacaaagggccattagaaccaacccatgccccaagctcagtagcccccccaaacccaaccccaggtcaaacacgcgaagacactgaccagcaacgcctgagctcccagtcggactgccaggcgccttggcacgcccatcttcaccccaccatccgccagcgcatccagggccataaatgcctgtggagatactgtctgaacccaggaagcaagcaccaagtacccactccccagaggctgatttctcctgatgaccggaattagtcctcagggtcagctcctcccacctccagccacgcccaagagacagcgctgctgtcctctcctccgccagccccgcctgtcgcctagaagtcacacaagtaggaccactcacataggcaggcccactgccgctgagccccgtgatggcgtcgatgaggtcctcctccacctctgtgcagaagcccacgctgctcatcagctgctccagcagcttcccgtcctccactagagcatgggtgcctgtggcatacaccgtggccccctcgcggaccaccacgggtgtgttggtcatgcagcggatcactttgggggctggctggaacgccatcagcttctagagcaggagagcaagccaactgagtgcccagggcacagctcccccggggtctgacccatcggcagccactcacgggccaccctcctctcacacaacgggcaccggggcatcagcaccttctccacagagctgatggtgacaccggctgcacaggacaccacgatgtgcctctcctgcacgtcggccccaatctcatccaggatgaaggggatgatgtgcggcttcacagccaggaacaggacatcactgtgccgcacggtgtccttattgcttcgggtcacattcacgcccaatctctgccggagaagaggacctggtcaatggtgccaggtagcagggttgagctctgcctcccacggaacagccaagcccctctgccagctgcagccagaactctagtctgtcccttcagggctccatgatcaccctcaagtgacaactttctgtccctgccactgggccagaaggcacagatgttaatgcaggacagggcaaacttcttcacggtggccagaaaagtcgctgttccctcaaccccagaaatcttctgacacccctttgccaggtgagaacccccatggtctgtgagcagagctacacaaagcccactctcaacctagcagccagagtacctagtttatcagagcaccaagcctctacagggtccccctaggactccaaagtgagtgtcagggccctacagtgtcaggcacaaacactgcctcataggctgtcctgcaccacactgcccagattttataagactcaggataagccaggcgttggtggcgctcacctttaatcccagcactcaggaggcagaagcagacagatctctgtgagtttgagatcagcctggtctacaaaagctagttccaggacagcctccaaagctacacagagaaaccctgtcttgaaaaacaaaacaaaacaaaacaaacaaacaaacaaaagaaagtaactcaccaggtcctttcccaacaccatcacttacaacagcacaaggctacagaaaaggaggaaacagtctcggagtgactgagtacttaatgtcacagaactatcaatgaagaaaaactaatttctgcctcacttggtggctcacgcctgtgattcccaacactggggaatctgaagcagacttttccagagttccatgcctatatagtgagttcaaagtaaagtagactagcaaacaaacagcctttcctatacacctacttttaccccagtgtctggatccgaccctatctttacctgggggctctcactacaaagggcagccccaaagaaggtggaaggcttgtcatgatgatctctctaggggaggtctgtctgagacagcccaagtcaggtcacctcaggtcacgcttttcccagtcccctccatccctcctaccctgagcgcagacaccgtgggcaggtccatttccggggagctggctattatcttgtgagccgacaggacgcctacagagaacaaggtttttcaacaggggattacggcctgatcatgcagcccatccatcaaaggaagcccatagcagctctggcagtgccggcctccgaaactggcatccaagcaaatggacgcaaatcgcccatccgttcacattcgcacacgcgctcactcactcattcacacactctggtgagacccagggttgacgatgcgctcaccggcggccgtgaagccccgcgccagcgcacaggccagctggcccgcgccgatgaaacccacactcatggccgcaggatccccgcaagcgccgacccggagacgctgggaatcctgggctcagggtccgagcctggaaagacccggatccgaagacctcggtgcagcttccaagcagggatgcaccgggcgcacagcaagggaggccgggactagacctgagcatccgccgccaagcacaggcctcaggtaggccacgtgtcccaagcagccaatccgagactggcatctcggggcgcaccaatcggtggcgctgcccggtcgtgcgctcgcctcccgctctctctgcgggtggagcctgtggctcgcctggggtctccgcgagttcctggtgtggctgctggtttctgactctctctggtccaggaatggggtctccaaagcgcctactagagatgaaccccacgtggagaccaggagatgccagggctccagctgtccgttagtgtcaggggaagccggcttccgcatgctccttcggaagtagaattaggtagagagaatcaactgtggaaggatttgttgatttctttagtggttcaattaaagcactgcttgttctgcctgtttgccaagcatgacttcactcgctacccggaacggaatagctacttggagaaatagctagaacagtgggtcgttgtccttaacaacctgctgactgccaccttggcttctgcacaaccttgcttgcttgcccgcaccacattgtagttttagagtataaaatgagaatgcaaaccggacccggcattgcggcctctcaggagctgtcctggcttcggtccaccggtgacaacgcctcttccactctcaatggtactgtagtgcttattccagaaggattcccgttacatgtccaagcccacaggcgggcgcccggggagctgcgggttgggcttggattttggagagtgcctcactatatagcccagactggcctcgaacttgtgacctccctgcgttactcactagagtgataggattacgggcatgtagacgaaaataaacttctttctcttttaaaaaaaagtataatttgtgttttggtattttgcctgcatgtatgagagtgtcagaagccttggaactggagttacagacagatctgagctgccatgtgggtgctgagaatcgaacctggctctggctctggaaaagcagccagtgctcccagctgctgagccatctctccaggcctcaaacaaatttctatagcatacaaatcataagcagtttccagtgccaccgaaaagttactttaaacaagattttaaggtgtacgcattccattcacagacgtaccctaccatggcaaccattttcccaaaggctaaagcccattcattccgtaggtatcaatcgagccaggttctggggatgcagttgtgaacaaatgttaagtggaacggttttttctttttttttaagtgtgtgcgtgagtgaaagaacgagagccacggagctcctgtggaggccagaggacaactttcacaaaccacctttccatcccacctggaagcagggcctccggtttctgcatttgaaatgctctgtgcttcaggctggtttccaggtggctctctggtccacacctccggcctctggtaggattatagatgttactacattccggtttctaccatgattctgaggattacatttatgttttcaggcctgcaagagcaagagcctttggctgctgagcagtctcccaggccatataacattaatataggcaatcttcatgctactgtgatgaaattccagtgtggacccctaaaagtgagatttccaggattccagtttgtggcttttttttttttttttctgtcagagtcttgtctttttgctcaggctgctcttatgctcccaaacctcctgccagtcttctaagaagcagaaagtacttacaaaccatctgccttcttgcagtccgctaaagtgaagtacctaccatcccacccagccatttgggacacaccctctgggagggccccagcctgaccgccatcctgcctcggatagcttcctagctggcatctgctcatgggtgctccccgcttctcttcctggactcccagacgtagtcaaagctagttcaacttcctccctgggtgccccctccctttctgtcctcccagccaatggttaagccagttcagcctcctcccacccctccatccggcgctctcccctccatcggtctgaacttggacacttgctttttatcagggcctcgggccttcctcctgtcttatccttaagtaacaggcctgcccctttctgagaacggggttatccaggaatgctgagccgcccacagctaggcaggtggaactctccagcacccagtcctccctcgccttattttattacatgggtatcgtgtttataacacaaaaattagtaattaggtttagtagaaaagttattttatttatttatttgtttgtttatttatttttggtttttcgagacagggtttctctgtgtagctttggagcctatcctggtactcgctctgaagaccaggctggcctcaaactcacagagatccacctgcctcagcctcccgagtgctgggattaaaggtgtgcaccaccaacgcccggctagaaaagttattctttttacttttctttttcagtactggggatggaagtcgggcctatccagcggcccaccattggcctgcacccgagccccggggtcttcagtgttaccacctaagggaccaatatgacatttttggaaaatagtgttttacttatttttcctgcacagtgaggcacatctaaagttgatttttctgatcttgatgtttttgtaagaacaattcagggagaagccgtgaccggttgtgcagatcttgtaatcggagcactccaaggcaggaagattgagggttcaggcccgtctgggatatatgataaaagaaaccctgtctcaaaaaatgaatgaaaattccactttactgttggagggctggcgatagagctcagtcggtagcgagctggaaggacttggctccctcccccacacgacataaccaagtgagatagtgcaatcccagcaaccccagtacttgggagacagaggcagagagaccagaagttcaaggtcatgtatcagacaacactatttcatacaccgaacagactaaaataaacaattttataggcaaaactgatgaaacttttatctctggattttgtttgtttgagacagtgtagccttggccatcctggaactagctgcataaaccaggctggcctcaaattcagtatctctggattattttattttatttttttttaagaaaaaccctttacagtccaggtcttttgtttctttttgtacattaggccataggttcttatgggatgggctacagaatggatttttaaccatctcacacaaaccaactgttaagtctcaaaccctgggacaaatggctgaggtgcctgtttaacatatcaaagcagacctgaccgccaggttctcccaacatccctcagtccctactggttataaagaatggctggcatatccccctcactccccgccctacccagctcactccccaccccccccacccccccacccccgtcatctacccgaaactctccaccccagggattgggctgcccttctcccagaggcccttccctatagaattcagccgttttggttactaatctcttgtaccttttgtcttttgggctgctgcacctggttcccctctctttcctctccttcctcctcccccctctcctcaagtggctcagggtcctgtccactctggactctcccaggcatctctggctctgctctcttttttatctacaataaactctcccttccaccacacctaggggcgctcgtgtcttttccttttcatttcttttttttattcactgtatgcaatatgactaagtgtatatatttaaaaattaccaaagtgaactgcatggtgacagcatatgccttcagtcccagcacttgggaggcagaggcaggctgatatctgaatttgaggatagcctggtctacagagtgagttccaggacaggcatggctacacagagaaaccctgtctcaaagaagaaaagggctgacctctaacaatacggggtgtgtgtgtgtgtgtgtgtgtgtgtgtgtgtgtgtgtgtgtgtgtgaatgcatataccattcctctccttgaacatgaccagggttaggctgtgcagggtgcagagtgagaagctcacacagccctccctgccttctgcttccctcctctccctcccctactcctttctcttttgaaagagtttatatatttgttatttatgtgtgtgagggcactcacgccatgctgcgtatgtggaagtcagatgatagctttgagcactgattttctcctctcaatgctggaagggatccagctggggcctcaggcttgatgggcccaatcctctgcccaccagctcccagagcaatagcagagttcatttgcaaactcgggttcagagcgccacctagtgttaaagcactagagatgactgtagactccagccacaaaggcacaaacaaaaccagactggaaaagtgtatttatactgtcttgctcttaccaagaattctgctgtcctcactgcccaactgtgggaagaatggttataaaaactcttttcattaatgtgtatagggaatttgtatgcatggatatctgcactgcatgcatgcccagtacccacagagacgagaagaaggtgttgggtcctatggaaatgtagttacagacagttgtcagctgccatctgggtgttgggaatcgaacctggatcctctggaagatcctgagggatattttttttgcttgtctagtacataaacaatggcatcttactgtagccaggactcaaggactagtctctgtgcgttagttacaggatttatttatttatgtttttttgaggcagggtttctctctttataacagctctggctatcttggagcttgctttgtagaccaggctggccttgaactcacagagatccttctgcctctgcctcctgagtgctgggattaaatgtatgcatcaccaccatgcctggctttacttatcaggatggaagtgatacatgtgctatacacatactattacctagcccagtaaatgcttgcttactacacaaccatcaccccatctccattacaagggtcaaagtactttttttggaggggcgggttcgagacagggtttctctgtggctttgaaggctgtcctggaaccagctcttgtagaccaggctagtctcgaactcacagagatcctcctgcctctgcctcccgagtgctgggactaaaggcgtgtgccaccaacgccggtcagatcaaagtactttctaaagaagaagtttatataactgttcaaaataatatttttgaatgagagttgtttggggaatttaaatgtaatccagtcttcaagcttccaaaactgggagtctttgattatgcccttatctcctttttggttttgttttttgttttttagacagggtttctgtttaacagctctagctgttctggaattcactttgtagaccaacctggccttgaactctcagagatccacgtgcctcccgagtggaaggctggaattaaaaccgtgtgccacaactgcccacctttgttttgttgtttggttggttggtttttatccccttattttctaatcatgttgctatcattccccatcattgtcttcgagcgaagagtactagaaatgacacagagacacacagagtgaaacatcactgtagttttgtttcttcagataacctatgttccattggcttttgctaaatgcaaagaaaaaagaagcatcatgttaatacatgcactttctcatggtgcttctctaagagggagggggattgtgagtcaccatgtggttgctgggaattgaacacacgctgaaaccatgctgacactgcacagcacataatgctagcgactgtctgtcctggggcagtggagccttagagctaaagcccagcactcctttttaagctaacaccttaactcataggcttctgcattgccttgagaccctgcttgtggtcagctccaaaaactgtttgattttctggccagtatcccaatccatagctcttcatcctcttctcctcttagtgcccttagaacaaagactacaatgtaggttttgttgttttggggttttttgttattgttgttgttttgtattctggttttttgagacagggtttctctgtgtagccctggctgtcctggaactcactttgtagatcaagctgacctcaaactcggagatccatctgccactgtctccagagtgctgggattaaaggcgtgtgccaccactgcctggcagcagtttggttttaaatgggctgagcatgatagtgcatgcctttgattcagcacttgggaggcagagcagttgaggccatcctgacatactaaatccctatcccaaaagaaataaaaaggtctagaatgttctggtattgaggaggctctttgccagatatcctcctgtctagggctcactgggatttttctgtttgctttgttttgtttaaatgaattcaaattatcaccacaagacagagtaaattagctgattcccctgttctcaccatagggtttcgttgcacaattagctgagaattggccagaaaacagattctctggcaacctgtccactgcttagccatgtcctctgctaagtgggccagggtgtcctaatggagtagcattatttactcacataagtgcttagactgggggacgatggacaaggaagccaagacacagaagcctgtagggcaaacgggagatgtgggcactgagttaggacaagttaacttactaagtgtggctacacggggactacagatctatccccctgggtacgagcgcgccatcggagacacagctacacctctgcaccctcatgttgggcaggctgaccacctgaggcctggtcctgcctccctccttcatgctgacaatcacaggcagggaggtcatctccgaggcaatgcactgccgtggccccagaaatggccacttgatggtcagggactctggcagctgcaggcagctgcccacacactcatagaccaggaaccccgggggttcaaggatccagttctccgcccacttcatcccctgcaggtccagatacatctcttgacgacagcatcgggtgccttcagtcactggggtctcagggttacaattgccttgagctctgtggggatgagagatcaagtcacctgacagacaggaccaaggtcaggagcctctgagaaagagacttaccacccactggtttcttaaggcattgcaagaaaacacgtgaaggataaagaaccattaaagaaacatgtctagaacacaaagtcatttactacttactaaggggttctctgtgtagccctggctgtcctgaaacttgctctgtagaccaggctggccttgaactcacagctctgcctcctcagtgctgggatactgggattaaaggcatgggccaccactgcccagcaattaaaaaattattttttgttttgttttttgagacagggtttctctgtgtaatagccgtggctgtcttggaactcactttgtacaccaggctgtccttgaacttccagagatctgcctgtctctgcatcccaggtgctaggattaaaggtttgcaccccactgcctagcacaataaaaatatatccttttttgagacagagtttctctgtgtagctttggaggctgtcctggaactagctcttgtagaccaggctggtctccaactcacagagatctgcttgcctctgcctcccaagtgctgggattaaaggtgtgctcccccactgcccagcacaataaaaattttttcatatatttatttatttatttatgtatacagtgctctgcccaggccagaagagggcaccaggtcgcattacagatggttgtgagtcaccatgtggttgctgggaattgaactcaggacctctggaagagcagccagtgctcttaacctctgagctatctctccagccccagatatatatatatatatatatatatatatatatatatatatatatattggctttatgagacagggtttctctgtggctttgaagcctatcctggaactagctcttgtagctcaggatgttctcgaactcacagagatctgcctgcttctgcctcccaagtgctgggattaaaggcattcgccaccaacgcccggcccgcattaaaaatattttttaacaacaacaaaagtatatgtagggcagccagtcagtggtggtgcacacctttaacaaatacaattttttaggtatatgcttaataagatgtttttgttttgttttgttttgttttgttttgtttttagtatttttttacccatgattactgaatccagtttaaggaccccagatgcacagggctatgcaatccttgtctgctctaaatatacctatctttcccttgaaaagaggaatccaaatttagaatagctcattctttcccatgaaaaaaagaatccaaatttagaatagctcaagctaaaaatttcaaagacttattcaagaaaggaagagtggaaataggtcgttacaattatgtgtgtaattcaatatttggctaatataccgtttctaaacgcaccactagaaactaccatgggtaggaatgggtcatctcctggggtggcctacacagcccatccctaaactggcctaagataaaagggaaggataacctagtctattgcattcccagctatctaacctccagcctacccgtaatccttgaggtccagcgtgtgcagctccagctgtggctcgccccgcccctctctgcccggaatcccttgagcagcaaagcgaaccaacttgtgagcgctccaggtccccgggcccagatgctccctctgcaccgacacctgcagcagcagtggctgcctcggccggctcagctgctgccagaagttcacagcctcggtcacgtcgaaggccttccaaccgctctcgtggatggacacgagcctgaaacacagctgagcgtcaggcgaggggactagcaggctgccagctaggccctggaggggtctcctgtcccgtgctgtccccacctcatgctttgctcccctccccgagcagggctgagccgagctccccaatccccggcaccccaccaccactcccacacacacacactccatccagttgctggagtcgctacctggagtcgatgagggccgtgcggttggagccatcctcacgaactcttagccactcaatggtgacccgagcgcgggcactatgtggggacagcctctcatgcctccggagagcagttctggggactggctcctggaagagccgcagcacggcctgcaccagctcgcaattaggcaacagccgctgctccatgccgaacactagcaagtgcttggaggtctccgacaccaggaacctgcctgccacctctgtggacatggagagagtcagccgggcttctacaagaaccgtgagacctctaggatggcagggccactgtgcagagacttggctggtacagagcatcccccattctgtgcctccggtgcaaagccggctacttaaaatctccaagcctgttcactaaccctccccagccaagcacaaagagctctgggatccagaactcatggagctgtagagaattgggtctccacaggtgcccggccttggctgtgtgttgagaactggtcccagcccttaggggagagactaccatctgggcccctgcatctcaacagctggctacctccatactcagggtgctggtttgttagtttttagcccaatgcagcttcaaccagtcacttacttcagtgtgcatagtacaaaacacagttgacttctgtcccagatggtccaagatgggaccccaggaagcgatactactgctttcagaactgggtccttgctacaccctacccacaccctaagattctgcttttctgggctctcctcctcttctctgggtcttgccaattactccaccgtgatctacctcctcctggccctgacagtcttcaatgcacaaccagagcctggagctagacctagccacactccaaagccatgcttacatatccctgctcctcagaaatgcacacaaaggaagggtccagagtgggcatggtcaaccttcccttcccagagaccagggccagcaggaagagctcacctctgaagttctggctgaacctcttgcctcgggagcggtcaccatgacttcgatgcagcagggacacatactgggccctcacatgggcagggatggccattgtctccacatccacgttgtccaggaccggagccctgctgagttgcagctgctgcagtagtttaaccagaatctgctcctcagtcacagctgccccacagccagccagggccagtgcccacagtacccaacagagccacaaggattgcatggtgccaccaggaggaaccatgggtatgtgagtccctacagtgccccctgaagtctcttggggcctagatggcctgttgagggctggtgctcgccttctttatagctggccctggggtggggggcagggaggaaggacaagaaaggtcacacccctgggacctcctgggagctcaacaccagacaagcccctgagccctcaaggaggggctgtctagaaagggtacaaattgctgtctggaagacacacgggctggggtttctggctgtgggggcctgcctctcaataatactgttcatgcctgttggagttatctgacagtatcacagttctgttttgtgggaaaaagaattctcaggaacaggagagtcactttcaccagatattggagtctcctggtttttaaaaatatatatacactatgtcacctatgtagccctggctaggctggaacttctggaaacaagcctaggtcaggctggccccaaactttgtggcaatcctcctgcctttaccccctgaatgctagcactgcaggcgtgcatcaccatgtctgatctgtctaagtcccttgaagaccattcctggaggtctgtctaggcctaggtttgtctgtggagaaagaaagagggagcagagtcctgtattcttgctgggtctggtcactttcacagatatctcagagtcaaagggactctacaccctcagtcagtccccccacgggtgccctggggctcatcacagtcctcacgccacccttcccccacatcagagaaagataggcactgctgactaaagatttggtgttgtagtctcagggaacatgaagcctgccccatgtcttcccctcagggtaccacaacgtgagtgtgtatgcgcatgtgcacgcacgggcacgcgtgccttcagacagcaactccttctgggtggatccacacatctgctcattccacaagctcttaggctttagccttgctcatggtcacagaataggggacagaaaccttcaaaatagaggccagatctgcccagaggcatgtccagtcctcagctatggccacaagcatgtgactgctcccccttatcctggctcccattttagaacagcttggtgggtgcttgaccttctagggacttaatgacactcagaatctattgcatagggctggaatggagaataaatgaatagacagagtctggagcttataaagcactagaaaagggtttgctttcattgccatcccttagaaggtgcactgtggcttctgtaaagacatcagtgaggaccagcgtggagcctggggatgcagctcaatggagcacttaactaatgcatgtgaagccctaggctcaatacccagcactgcatttgggacgtggaggcaggaggatcagaagttccaggtattcctcaactacatagcgagtttgaggaatacacaagaccctgtctgggatacacaagaccctgtctcaaaataaatacgtaacagatacatgcatgcatgcatgcacacagcagcagaaaacattgcttgagtgttcacatgtgccaggccctgttctaagctgttggcgtggatccatacagccctcaggaggcagattttagcctcaagtgcacctttcagatactgctcagatcactacaggacagtcacctgtcacaatgttcggttagtggagagcttcggacatgaatgtcggcatccgtcacccaaggcctcttctggcttaaagatctaagttgtgtgcaaagggaaacccttcctgtagcctcgattcttatggaaggtgagtaatgaccatggaggagctaagggccagaggacctggtagacagggatcacctttccgccttcccagtgtgggaacactgacccctgggtgtgccctgtctcctagtaaaactctttctgccttcctcagatatccctttcttgggctcaagggcagaactaactctgataacctcccaaactgtcaccacacacacacacacacacacacagacacacagacacacacacacacacacacacacacacacacacacacacagacacacacacacacaccaacacacacaccatttctgatagggctgagggtctgtagtaaagcatttgcctagcattcacaagtcctaggatttgagctccaccactgcaaaaaaagaagaaaaaaccccactgatctgctaatgatcataatggctggtagagcttataggctatgtatgcaggatacaggtttgctttgtttattttgagacagggtctcactatgtagcccaaagtgacttgaactcaaagtcctccttcctcagccaccctggcgctgagattgtagatcctgcctggcactgttactcctttatcctcacaataacctgggggcagacaggaatgccgtcattattatttctactttctagacagacactgagacatacaaccattacataacttgcccaggggtggacaatgagtgccaagtgcagggttatttgaagggaatggcatggagttcagctcacagactgagatgagaggaaatataaaaatcttgacaggcggccccagagagcgaagtgtcagagtcacagaacgatgacctcggggcttccctgtctcactttctgcttctctcccacctctgtttctaaggaaactaggtaatcccccaggaggaattcaaatctcatttgggggctgggcctggctcagtggttgagtgcttgcctaacatctgcaaggtcctgggtcccattgccacaccagcaaaacaaaaagaaaaactaatcctgcccggagctcacatctcctaatcagggtcccctgaaatataagacccccaccctgcatccggcccaaaggagcctttggtgactgacaaactcagcctccttcaaaaggaacaccggctgccttcctttgcaagtgattaacagggaagggactttgggatgctaacatttggggctttagtcaggacaaacggcacggaggtgtcacatttacaggtgaccaggacccatggtccttagtccctggaagttcttctgggctggtgtcccataaatatgcaaaagtccaccgccttgccactgggtgacagaaaccccgtggcttatctcagtcgggttggtgtcaaaggtgtaacatcacccgaagcccttctgtcccagagccaaaggacaggcatctgctgccgtcacctcctgacttgcagaccttcccaaggcctctctactgccacctcatggacacctggggtctgaggacctctgggcaccccaagtgactagcgtacctccatctacccttcaacaacagaccaactaagccctggaaatatccattcccagagaagatagtacaaggggtgccccttctctgcttccccagagattgaggagcctggggacatttagaaccaatgaaaatctggtacagacaagggcatcctgtttccctgctcgtttgtagtgttagacttctcagagcagaacctgactatctggaccatgcagacatgcagagaaaatgggctcagagaggccacagctccccagagtcacacagctttgacacacagtcagatgctccaactcgaaggccagagctcttcccacacctcaaactatctctagtgctggcttcactggcagaagccatccgtcagctgccggccacttgggaactctgatgggggcagggcggcgtgagaagccgacagaaaaacagaggttcaatcttccagactcccgaggtttcccaagacccaggccagggctcctggatgtggattcccagcagttctaagagtgctgttgggaaaatacagtaattgggcaattagccaacagcccaaagaaggatgtcaatgtggattcggaaaacttttacaatgggcagattgctcgagtcgggggagggtggctacttttgtcatgtaaaggccaggcctcgccctcatattgtggatctgagtgggacggagtgtctggggtggggtcaggtcaggcttgaaaagcagaaagcttgtcaaatagcaccccaggtcttggagagcagagaacactgcttttaaagctctgtcaatgagaccgcttttccaaagccgtttaaagtgggaacagtccagactgtttatgaaccgaattctttgggatgttgaaaatgtgcccaccctactcaccccggccccaaagccctgccccttggagcttctactctgtggatgttctgaatgattgtataagtgctgtataaaaatacagattcttcaagacaccatcagcgagcctgttccttaggactgagaccacaagcaccaatctctcacaacccagttttgcttcatcctctggggcccaaagtccagactggccaagctgttattccactcggtggagcatcatggagcctccatgcaagccaccgcctgggcttcagggatggccctgtgtccacggttgtgtcatttgtcactttccaccagacaggtttgttccaggaagagtcacctgagacttgtgggctcctgtgcctcagcctggccctctgcttggatttcaccagagacagggtccaggaatcagaagctagagattcttctgttggagaaatagggcggagggcacagggtgtatcaaagcaggccagggaggcagatgtcagataaggaaattggtaccattcggatatacataacccagccctcccaggggatgataattatccctcaacttcctatctacctatgatatgaagaaagaaaatagctgggtggtggtggcgcacacctttagtcccagcacttgggaggcagaggcaggcagatctctgtgagttcaagaccagcctggtctacagagcgagtgctaggactgccaaagttacacagagaaaccctgtcttaaaaagaaacaaacaaaaagagtaaaaagaagaggacaaggggagggggcaaaaatcaataagaaatgggaaattggatatgtgtgtgagtagcgcagattaaaatcagtcttcgccagaagctaataggtagcactggttctcagtggctaggggtggaaccagaggccacacagacactaaagcaagcactctacccatgatctgtacctagcctgacacaacgttaaagttgaaaaagagaaaacaaaacaggcacactggtttatataagacagacagtaagaaaggccctcctacacagacacccaagtcctggccagagcagcactgtctggcacgcacttcagtgcagtctaactgtgcaaggccaggtggctggtcgggttaggtgtgtgataaccagtacagagctctggtttcacttggcaataaatactgggcggattcccttcctcacttggggatcgctttcccctgacttcatataagctcttggtcagtcttttctttcctttctttctctttctgtctttctttccttccttccttcctttttcctttatttgtttttcaagacagggtttctctgtgtagcactggctgtgctggaacttgctttgtagactaagctgaccttgaacttaagagatctgactgcctctgcctctgcctctgcctctgcctctgcctctgcctctgcctctgcctctgctctctgcctctgcctctctgcctctgcctctctgcctctgcctctctgcctctgcctctgcctctgcctctgcctctgtctctgcctctgcctctgcctctgcctctgcctctcaagttctgggactcaaggtgtgtgacaccaccacctagcactctgcctggttctctctatatatctagtaagacagggtctcactctatagctctggctggcctgaaactccctatgaagactgctgaaattaaaggtgtgctccactgtgtacagcttgattctaaatttttaaataactgtatctatggggtaatatgcaaagttctgatacagatattcatcattgtaatgatagtctggatttttagcttatcccatcagctcatatatgaccactgctttgcagtaacagcattcaaaaatcctctttctaaaaatcggctatggtgaggctggagagagggctcagaggttaagaacactgcctgctctcccagaggtcctgagttccattcccagcaaccacatggtggctcacaaccatctgtaatgagatctggtgccctcttctgcaggcagaacactaataataaataaatctttaaaaaatattggcaaaaatatataggcatggtggctcacacctgtaatctcagcacttgggagcctgaggcaggaggattgacatgagtttgaggttagcctgggctatgcagaaagaccttgtcttagaaaaataaatcctctcatcctgctgtgtttttttttttgttttttttttgttttttttttgtttttttttttttttttttgtgtgtgttgtgtgtgtgtgtgtgtgtgtgtgcatttgtttgtttggttggttttttggtttttcaaggcagggtttctctgtggctttggaggctgtcctggaactcgctcttgtagaccaggctggtctcgaactcacagagatccgtctacctctgcctccacagtgctgggactaaagtcgtgtgccaccaacgcccggctcatcctgctgctttgtaacacataataataactccagtttgataaacacacacactctacaactgagctctgtctccagcccctgcaacacaacgtggccaactatagccacacttctatgcagtaatacaccagaacttagtcctcccgcgtagcttgggctgcacatcccttagccaaccctgtcccaccgtctgctcccctatctccccagactctggaagcctctgctgcctctacttctagagatgaactcttttactttccacatatgagtcgctcggtatttggaagtggaaaattcttgtatccctctttctcttcccttcccttcctttttaaacagacatggctggcccctgggccctggcttccgatcttatccttccagttgtcggaagtataggttcatgccactccagcctggctagagaaggggggctatctcaggctttttagttatgggtatgggatctatacaaaggcctagggagaagttaacagaggctgtggctttgatgataagggccactgccccacactctataagtcccagggctgtgataacatgtggaggggagatttacatttctgagaactagaggtgtgccaggcaaacagatacatagtaaggaatgtggggtctgttgggaatcactcggataagccgtcctttggggtcagatcctctctccagaaatgtcagttcattatcagcagctcggtgcagcctgaatgggaaggaaacaagagcttggagaagcctatcgacttactcccttcctgcttgctcattagggaaggtgacatcccagccaccaagcacttttgctgcctttgagctaccctgccagcatttggtctcctcctggagcatggagaggccccgatgggaaccgtttggggatgtgtgacacaaaatcaaacagcccagaagaacaattgtctcccactccacctctccactcttcaaaggtaacttttgaagctttacccccaaaaccataattagatttttttaacgatggtttcctaaggttctctgctgtgaaaaaccagcactcacgacctcctctcactctgcacccacctttcttctgactcattcacgtgttggttggctgactccagggcttgaaccaggcccctgcacacactgagcaaggaaccggccagtgagccactgagtcaataaccctgtttaaagacaaccccaagcttccgtattctagagcactcacccatctccactgctccctgcaagttctcccaggggaattaaccacggctattatttttgtattatccttcagacatttttccataaattaacattttttttcttttcagttttttgaaaagggtaaaacccagccaaaccaggttagttgcaaactcccaataatcttcttgtcaaaactttttagaatggtggtattgaattacaggcataaacaaacatatgtgtacacacacacacacacacacacacacacacacgtacacacatacatatacacacacacacacacacacacacacacacacacacacgtacacatatagagaaaagggagaactcgtgtctcttccgtgagcctggccttggatatgctgccatttccacgctgtccccccaccacccctacaccccaccccccagaaccactgcatcctttggcgatgagggataggttctatgtaacccaagctgacctcacactcacagcacccctgcccccacctcttgaggaccaggacgtttggttatcacattctttgtatggccgagtcatgttctgaagagtggaagcattcctctgatgaacttgtagatttttttcccccgcattgcaaacaacactatgactacaatgacaactctgtgcaaaggcagttatcaaggacagatactggagactgagtagaagagtgttcagatctcacggccttgccatattcttgcagattaccctcgttaaaaacccaactaaagggctggagagatggctcagaggttaagagcactggctgctcttctagaagtcctgagttcaattcccagcaactacatggtggctcacaaccatctgtaatgacatctgataccctcttctggcctgcaggcatacatgtaggcagaccactatatacatgataaataaataaaactttaaaaaaaaaaaccaactaaatgttggttaagggaaagccttagttaagcacctgcatgtaggcccctctagtgtggttggaatggagaggaaacagctggccttgtcattgtcttgctttcctctgattatcagtcagagtgaaccaactttccaaagtttatcaccacttaggacccccgccccagccccatgacagggtctcattgtggcccagattggctttgaaacttcaatcttgtccagcacagtgtctcaagtttgtaatcccagaatttagaaggctgaggtaagaggattccccatgagcttgaaggcagtctggactacagagtgagttttggatcaggctgggctggttcttgaggtcctcctaaataaacaaataaacaaacaaacaaagcaaccccaactcttctgcctcagtatggagattctagatgtgccccacactcccagctctgcttttctattccaagtgtgtgtgctttttaagaacattttcagccagccagggggtggcacacttctttaatcccagcacttcaggggcagaggcaggtgaatctctgtgagttctaggccagcctgatctacagagtgagttccagtatagccagggctatatagagagaccttgtctcaagaagcaaacaaaagcagtgacactatctcaaaataaaacaaatacaacaaagaataagaatgctttctttttaaaaagaagatgttttatttgtttatttttatgcatatgtgtttatataagtgtatatattcgtgtgtgtgcgtgtgtgtgtgtgtgtgtgtgtgtgtgtgtgtgtgtgtgtgtgtgtgtgtattttgtctgtatgtacttgcatgtaccaagtgcatgactggtgtccgaggaagttggaagagggtgccacttctcctggaactggaattacagagagttaactgctgagccatccctccagcctcaagtggctcctttatgccaacttctataaccttatctgaaatttagggggtttttgtttgtttttttcttggttggttggtttggttttgtgggttggctggtgaatttttttgaaactgtttgactacgtagccaaggctggcctgaaacttgttagataacccaggctgtgctccaatccagatccaagccaggtgtgagtgcaagcctataaacctagcactggcagaaacaggtgttatcaggagtgcaaggtcatcccatgttggtgagttccaggacagcctgggcaactgtccctgtccaaccctcagctacctctactcagtgccagaagagagctttgagaccctcctgcctgaggctccagagtgccaaggctacaggcatgccccactctgaggttccttaagaatggctccttttttctttcccttaataacatctcgtcctgtcaacggtcccttccctcaccagtgtctgttctctctatctggaactgctcaacaccccatttcactgtcaaattgttttgaaacagtgtctcatgtatcctaggctgacaatggcactgggccctctctcgttggttctgtcacatgggcctgaagagtgccaggactgtgcatcacagcagacttgtgtacctcacacaggtccgtgctcaagggacagcttccatgctccctaggtactgactgcaggatggtgtggtcccttcactctcaccacccccctgcccaggatgcccccaagcacacagagctctgtctggaggcctatggaaacctctggggtgtaccagttggcaggcaggaagtcttggatgtagaagcccacactttaccaaaaggagccagggtagtttagatgctatccggacgccacatggatttcacttgggcaagtcacttcttccttaacagacacacagcaccctaagccagtctctcttgtcctcatttgaggaccacagagtgtgggaccgaggctggcctctgtgaggagggacagtgggtttgggttagttcagttgccctagaatgaggagcaatcagccagctgagccctagtccccacaggccaccaaggcttagttaataagcagggtgccagggaagacccgtgagtacggtgaccggaagagcagtttccacagtggcatctctggaggaagagctacagttctaaagttccttaagtggcttcatggacagtggaagagaggccaggaggcaggaccactgtgggcacaaaaagaaaagggtaagacactggagagatggctcagtggtgtagagcgagctcttcttgctcttgcaggggatctgagtttgattcccagcacccacatggtggctcacaaccatctgtaacttcagttccagggaattcaagaccttcttctgacctctgtgggcacagacatacatggaggaaaaatactggcacatataaaattaaataaataaatctaaaaaaaaaaaaaaaagtaaggtcagacccaaatgctggcaatagcagatagggtgaagccactagcaactgaaaacattggggctgtggtaactgaggactgaatgggtatggagtgggggtcagggaggtgactcccaggcctggacacctgtaagaggatggggccctaggtaaggactcccaggaaacctgggaggagaaagtgtgatctgaaagtctgaaggtttgggatagggagccatatgcctggtaaagtcggaacagtagagccagcaactgaacccacgcttcctgatgtcatcatcagaggacaccagttctcaacctttgggtcccgacccttcagggttaaatgacccttttataggagtcacctaagaccattggaaaacacagatatttacattatgattcataaaacagcaaaattacagttatgaagtagcaatggaaataattttatggttggggtcaccacagcatgaggaactgtattaaagggtcacagcattaggaaggttgagaaccactgtcacaggagaaagatgccatcatgtcctgtggagaggcccaccaaaatctcttcagagagtgagaaagattacaggtatgataaatttactcgagacttagtgcttaagccaggaaagtcatatatgtgtgctcagcatccaggaggcttcacttggtcaaggccagccagggtagctacatagtgagttccaagtcagttagagttgcatagcaggggctggagagatggcccagcagttaaaagcactgggtgctctttcagaggtcctgagttcaattcccagcacccacaaggtggctctcaaccatctgtaatgggatctgacctcttccagcatgcaggtgtacatgaaggcagagcactcacataaaaagtaaataataaaagtaaacaaaataaaataaaaagagttgcaatgcaaagagcaaactagtttcaggatgcagtcacagagcccagtgtggtcaggaatgtctgcaatcccagcacacaagggcccaaagcaaaagcatcatgaggttccaaggctaacttggactatacattgagcccttttcctaagaaacacaacagcaggcagctcctctcttgaacaacttccattcaagagaggagaacagagatagaaatagcaatctagggactgtccatttggaaatattttttaaaggtttatttatttatcctgtatacagtgttctgcctgcacaccagaagggggcactagatctcattatagatggttgtgagccaccatgtggttgctgggaattgaactcaggacctctgggaaagcagccagtgctcttaacctctgagccatctctccagcccctctatacagaaatattacacaatatcaccacagcaaataagtgagaaagtgagaaattggttctatttttatttaagaaaaatggggggggattgtctcactatgtagaccaggttggcttcaaactcacagagatccacctgcttctgcctcccaagtactgggattaaaggagtgccccattactccttgctctgtgtgtgtgtgtgtgtgtgtgtgtgtgtgtgtgtgtgtgtgtgtttatttatttatttgtattttaagtgtattatggcttgcatgtacgtctgtgtgggggtgtcagatcccttagaactggagttacagacagttgtaggctgctaggtgggtgctgggaattgaacccaggtcctctagaagaatagccagtgctcttaaccacactaagccatctccccaacctgtttatttaggttgttttcaagacagggtttctctctgtaggcctggttgtcctggaactcgctccatagaccaggctggccttgaactcctagagatccacctgcctttgcttactgagtgctggaattaaaggtgtgcgccaccactgcctggcttcgttttgaatttttaatgtcaaagtattgtcttgattactgagctttttggcgcctttaaattttgtatccaaggggagtacctcgtggacttcaccctggtcccagccctaagtggagtacttccaactgcaagaatgccagaaaagaaagactagggggagagggcagtgctccagaagggaggctagccaggtggagaggctgctggaatgctcacttactcactccctccctctgttgtggctgaggactggatggaggtggtaaggccaaggagatgaccccaggtgaccttgctatgccaacactctttcgttctaatttgtccaagatggtgggattaggggagaagaagcctccgggagtccagctcagcccagcctgagggacccccacccccacccctgtcagtcctcagcagcttccttactgcctctgaggttagacagtgcaaagtcccccttgaggaagaacttttccaggaagggggaaatcaagtctggaacccaactcggtcaccgtctttggatggatgagaggccctgttgtttctatgccagcccgagggctcccgtatcataacatatttgtctctgggcttcttcattcctacagcccacacaacagagaactttgagaggtgaaactgaggccagaaccttgcctcgggtcactcagctttagctggtaagtctacctcacttggatttgaacccagaccccctgctgtgggtaccatcctgaagccttaatctctcatggtcaacaatcactcagttgcagcacaagggttgctctgggcagctagctaagctcacagttcatgtattcactcaacatctacccaacagctgtgggtcattagacacctcggagctggggcaataaagattccatcacaaggtggctcagagctggggagacaaagactgtggttctgcctttaaagagtttagtgtttggcaaacactgtttgtcaacagaactcggaccatagatgcagtggctgggctgggccaccggatgctaacgtggggaaatctggattcgcactggcttcctctaagcagctatttccttcctttgagggtggagccttctgtgctgactggaccagacttgcagacctggccaacctcttgtctctttgctggaggacttgtgccaccatctgggctgcaaagcaagtgtcatcctggccatcccacaggacagtaagtagccagactgttgttgtgccccagtggatgtggccaggctcacagaggtgtcaatagtttgcgctcagaacaggaagtaagacagggtctaagtcagtgatgggctagaagtgtccggtggttaagtcagtcacttaaccctgtctttaacctcctaagtcacttaacctcgtgcagagggcccacgtttgtcccaatctacaacagtggcaaacaccggctattaactccagttacatgagctttgataccctcttctggcctctgatggcactgcatacatgtggtataaatacatccaggcaaaacactcatacacataaataaataaatcataaaaaggaaaaagaaatagttggaaccctgagcagggatgttagcttctttccacaatagaaatctctccgttggtccttacttcttagggtcccagtggttgtctgccatagagtcttcatgttgtagaccaggctggcctcgtactcacagagctttgcctgcctctgactccctggtgctgggattaaaggcctgcactgccaccaccgccaccgctgccacgctcccccatagagtcttcaaccgcacttggcttagctggtgtctagaccacctcatgagttaggtgaccatggccacttgcgctgtcttgcttccctccacatctggaggaggagggttaatagttttcgtaggtgttggtatcaatccaaacacatttatttgcagcaatggagatgaacccagggccttgtgtctcactttgcagctctggctagccccaaaattgctatgtagccctggctggctttgaactcatagagaactacttgcctgtatctcctgagtgtcaggattaaagtcatgcactaactaccacaccaggctctgaaccacagttttttgtgttttcaagataaggtttctctgtataacaagtcctggttgtcctggaactcactgagatccacctgcctctgtctcccaagtgcagggagggattaaaggccaaatgctactgctaccgcctggccacgacatgcattcttaaactgctgagccattatctctcctgccctgcttagagttaggcatcacgatttggcccttgatttggcccttgaacctcctctctactctgttattaaaacctgtgggtttctgctagttgcacttaattttgacatgagtcattctggtactaggtgaacttctttgtcctttttttttttttttttttttgacagtctagggcttcaccaggtctgaaggcagctatgatggccagagcagcttctgtagcagacccagggttgtcctcaccccagggctgagtgacacagtcccacagaggctgaggccacccatctggagactaggctacactgagaccttggaggagcaatggagactcacccaagatttttctttctttcttttctttttctttttttatttttattttttttattttttgagacagggtttctctgtgtagtgtaggggaagctgtagccacgccttcttaggggctggctacaagagtacctgagggcttgtgagggcgtggtcagagtgagtagggggactgcgttttcggtttcggtttctctttgcttcttgctgtacagactaccaccggctggctggttcgctctgtaagtaaggcttttccctattaaatacccttatatttctacctgactccgtattggtaatttcttactatagtgtagctttggagcctatcctggcactcactctggagaccaggccggcctcgaactcacagagatcctcctgcctctgtctcccgagtgctgggattaaaggcgtgcgccaccaatgcccggcccaagatttttcttgataacacaaaaataaaacatccatcgaacccactcaatatatcctcaacacacacacacacacacacacacacacacacacacacacacacacacacacacacacatacacaccccaccccctcacccccgcccaacacacacaccagctaaaaagacagcaaatggtcagggttctgtgtctgtcaaagaaacgagtaatggcgctgtagtacgttgaccgcgcctataagtgctttattcatgacccgtagaaagaaaacaagcgacatcagaattcaagagacagaggttccgagcatagctcataggtggggtaatctcctagcataaggatctaagctcaattcccagcacttcaaagtcaaacaagcagccctgtcaagttcaggccagtttccctaaccacctgctgcccgtggcgggcagtagggttgcgtgccaaagcttttggggaatctggtgcccgccagtagctgtccctatcccatcccaccacggtcctcaggctccactgatccattccctcccctttgcttcacttgcaacttagaacacagcgctctctggtggccacaagtctttctaccctacagatttttcccatttagtgtttgtctctgtagctctggctgccctgcaaccctctatagaccacgatggctggaactcaagagagccacctgtctctgcgtcctgtgtgccaccacactcagctttgtttagtgtgtttgggacagaatctcattatatagccttgtctggcctcaaattctcagtctctcttcctcagcccccccccccgcccccagctcacgaccccatgctgggattacaggtgtaggccaagctgtccctggaagcagcaggtggtattttccagggctagtggtgagcatctcccttaccgtggatttgccatgcatgtttccccttcagttgggctgtttggtagaatggcgccactcatttttctcaaccacaattgatgatgtacgtccggataatgtcggttcctcaggatactccctgccattgttcccaccttcctccaacgcagcccgcacacttgctgcctggatccctccctaattgttttgctgatagtttaaggggcatgtgtccacagagcaaactccatcaagaagccttgacgcacagctggaaacagtccaagagctgtcctcagagatgtactgaacttcaagggcaaagatgtgataagcctcctcggactaactgcattcctatgccgagccaaccaagtggccaagtgagccacttggcaagcttagaggtttctagtaggttccatgcaatagccaggattacactcctgtatacacctctaattacttcatgtttttctcatttcgagctttatccctcactcccttactggggaaatgaaactcagggactcatacattacgtccctagacactaccactgagctacagtcgcagcgtattgggtgcgagacagggtttttgttcttgtttttttatagcccaggctgatcgcaaattttccatcttcctgccttggctcctgtaccatcattgcccaaacccagcaagatgtgctagattcaagtggcttgtatatcatgtcaaattcctgctatgcaccgaagctccattcacaaagggaaactgctatcagtcagttttctaaataagttcacccaggccttctctggcaaggccaagaccatatccacaggtcacagctctggcacctgtttctgcccttgttacatctctgggaagatactgccaccctgagcgttaacccctgactgctccaagaccacaccatctaacctccagagcctccatgtggggacaccctcagagccccagtccccctcaagctggcttgggttctgcatctaaaaggaacttggtaaggaaactgaaggtggctattccaaaacaaaggctaagtggacccgcagcagaagcccattaacaccctacatgtggacgggcaagggtgggagtgtgacagagctgtacagtagaagggaccggcaagcaagcccagccttccacattgcagggacaatcaggatggtgacctgtttacatcacctgcctgtgaggagctgaccacgggctgctcacatgcctatgctaagtaaggtagggcacagctagagcacaggcaacctgaaggaacaaccaggccattaggaaaggtccctggccaggcaacctaccgtgacaacagaaattcttcaggtacggctgcccaactgacctgctgatgcgcagagattctacaaggtctgcactaaaggtctgcacggttgcgggatatttgatcacatagtgataccccaagtccgttaataaagttaaccttgggttgggggtggagccagtggcgagctgactggcattaggcatagagaagccaagaatatggatagagaagacacacaggaaggagtggggagggactttgcagtctcttccgtctgagaagtgtggagaggtcaactggttgctcttccacttgtttgaactatcaggtttcaccctatatttgaaccccaagcctttattggtattagaacaacttagataaacatatcatagcacccacaatttattctggggggagggggtgttgtctttacataggtcttgctatgttgacaaggctagcccttcagtacctggtattactaagtgcgagccactccgcctgaccctttcaaatgtccttccacatggtatgaaaggagggctcagctacccacgctagaaaaatgatcctccctaaacagtagaaatgtctctcaggcttcctgtgtgcaggacagctgagtgaccgtgtctaggctgctgctttagaggcataatctagaaactccacctgtgtgcagagtgggaatccggagggttccagacccctcttagagactcagtttggttacatcatagaaactggacaagcatgggataaaaatgtgtgggtgggaggggtaacaataatagacttggtgactcagggaaggcacagccacatggtggtcagtgtattatgtctgtagactcagggaaggcacagccacatggtggtcagtgtattatgtctgtagactcagggaaggcacagccacatggtggtcagtgtattatgtctgtagactcagggaaggcacagccacatggtggacagtgtattatgtctgtagactcagggaaggcacagtcacatggtggacagtgtattatgtctgtagactcagggaaggcacagtcacatggtggacagtgtattatgtctgtagactcagggaaggcacagtcacatggtggacagtgtattatgtctgtagactcagggaaggcacagtcacatggtggacagtgtattatgtctgtagactcagggaaggcacagtcacatggtggacagtgtattatgtctgtagactcagggaaggcacagtcacatggtggacagtgtattatgtctgtagactcagggaaggcacagtcacatggtggacagtgtattatgtctgtagactcagggaaggcacagtcacatggtggtcagtgtattatgtctgtagactcagggaaggcacagtcacatggtggacagtgtattatgtctgtagactcagggaaggcacagtcacatggtggacagtgtattatgtctgtagactcagggaaggcacagtcacatggtggacagtgtattatgtctgtagactcagggaaggcacagtcacatggtggacagtgtattatgtctgtagactcagggaaggcacagtcacatggtggacagtgtattatgtctgtagactcagggaaggcacagtcacatggtggacagtgtattatgtctgtagactcagggaaggcacagtcacatggtggacagtgtattatgtctgtagactcagggaaggcacagtcacatggtggacagtgtattaatgtctgtagactcagggaaggcacagtcacatggtggacagtgtattaatgtctgtagactcagggaaggcacagtcacatggtggtcagtgtattatgtctgtagactcagggaaggcacagtcacatggtggacagtgtattaatgtctgtagactcagggaaggcacagtcacatggtggtcagtgtattatgtctgtagactcagggaaggcacagtcacatggtggacagtgtattatgtctgtagactcagggaaggcacagtcacatggtggacagtgtattatgtctgtagactcagggaaggcacagtcacatggtggacagtgtattatgtctgtagactcagggaaggcacagtcacatggtggacagtgtattatgtctgtagactcagggaaggcacagtcacatggtggacagtgtattaatgtctgtagactcagggaaggcacagtcacatggtggacagtgtattatgtctgtagactcagggaaggcacagccacatggtggtcagtgtattatgtctgtagactcagggaaggcacagtcacatggtggtcagtgtattatgtctgtagactcagggaaggcacagtcacatggtggtcagtgtattaatgtctgtagactcagggaaggcacagtcacatggtggacagtgtattatgtctgtagactcagggaaggcacagtcacatggtggacagtgtattaatgtctgtagactcagggaaggcacagtcacatggtggacagtgtattatgtctgtagactcagggaaggcacagtcacatggtggacagtgtattatgtctgtagactcagggaaggcacagtcacatggtggacagtgtattatgtctgtagactcagggaaggcacagtcacatggtggtcagtgtattatgtctgtagactcagggaaggcacagtcacatggtggacagtgtattaatgtctgtagactcagggaaggcacagtcacatggtggtcagtgtattatgtctgtagactcagggaaggcacagtcacatggtggacagtgtattaatgtctgtagactcagggaaggcacagtcacatggtggtcagtgtattatgtctgtagactcagggaaggcacagtcacatggtggacagtgtattaatgtctgtagactcagggaaggcacagtcacatggtggacagtgtattatgtctgtagactcagggaaggcacagtcacatggtggacagtgtattatgtctgtagactcagggaaggcacagtcacatggtggacagtgtattatgtctgtagactcagggaaggcacagtcacatggtggacagtgtattatgtctgtagactcagggaaggcacagtcacatggtggacagtgtattatgtctgtagactcagggaaggcacagtcacatggtggacagtgtattatgtctgtagatttcccagaaggagacaaaaaggttaggatggggagggaggggtgtgaagaaacaagtgcttcaattttttccatatttaattaatggcataaatttacaaaattcaccaaactccaaggttaaaaaatcagtagacaacatctaggcacatctgaaaacagcccccaaaaggacacattatgatagaaaaactgtgtgactcaacacccacttgtcatcagagacaaggaccagatgatgacaatggcaagacagattcgacacaaaggagagacaatacatgctgtatgtaggaacccactgtagctacaaagagcagggagaaaataaatgcacagaaaacacacgctgtgaaaataaggacaaaggctggagggctacacttcagataaatacatgttaaacaggaaactaacaccagagatgaaagaaactgcatgacaaactgttcggtatgtactagaacagtgaaacctaataacagcttcaaaatagaaagtaaaaacatgccgggcaggaggcagaggccggcggatctctgagttcgaggccagcctggtctccagagcgagtgccaggataggctccaaagctacacagagaaaccgtctcgaaaaaccaaaaaaaaaaaaaaaaaagaaagaaagaaagaaagaaagtaaaaacattagaattacagaagtagaaatggggtgaacatgtggacatgaccaagatatactgtatatatatatattttatatatatatatatatatgtgtgtgtgtgaagttgtcaaaggtgaaataaaaaaatctaaaaccaaccagagcaagattttttaaggcaatgcagaaacttctatgcatgtaagatcactgacctaatacataatcgacaacttaacaaatactaataagattatttttatttcaaaaaaggcaattccaatcataattctaatgttctcttagttccttgtgaaaacaaaccagcacagacagattgtaggaataatcctaccaaccactcacatgacctgtattccagaacacactcccctgccagttgagaacatgtgtagtcctggttgtcctggtactcactctgtagatcaggccggcctcaaactcagagatctgcctgcttctgccttcctgagcgctgggattaaaggtgtgggctaccatacccggtttgtgcttgttcttttcaacagtacactgcaaggtattttctgacctgaatagtcagtatcaataagacatttagagaaaacaaatatttgctaattggacaatatacttaaaaaaataaatgcaagaaaatctataatcagtgatctaaaggaactaaagaaaaatgagtaaagaaaacccaaggtacataggagaggaaacaaaatgcaaatgccaatgagactgacaattgagaacaattcataaaccaaacgaaatagacccctgctaaagtaaacccccagtgtgagaggcatgggagcagctaggtcccatcccttgtagtacacagacactcagtattggaaggagagaggtttttaccacaagttacgaataactgtctacaaataaattttctgaaaacacaccaaaatgacacaatataaaacctaagaaacttatgaacgcctgacaaagcagatgcaggggctcagagctgaggcagaaggatcactgcaagtctgagaccaaactgaactacaaagtcgtttgtcagtccagactacagagtgagtctccaccaatttttaatttgtttgtttttctctgtgtagccctagctgtcctggaacttggctgtgagactctcccaaaaacaccaaaaagaaaggaaaataacctacaaagttttttctctccgatgaaaacctcaagcccaggtaccaatgaagagagactagttagaagtgagttattgaaaaaccgccttttagtatcaacaggaacattggccacaagtccacatcaagtcagaggaagtgtcaaaatcatgagagctgaggaaattcatttcttcttcccttttgaaggcttggcaaacagagctgggtcaatgtgctcctttgccaggcccctgacagagaagagcctggctgcacgctcctgcagggtgcccccgcacttcagtccaagggccatcagttcactcttcagcctctccaaacccagcgactccaactctgctgcggagctgaatgctaacagatccacagcttcctgacggagagcctgctgggaaaaggaaacaatgaaagccagcccttcctccgaatgaagactataattaccaagtacattctgttccatgaactgctggttactgtaccaccaccctgctatttactgacctgtcatctagacaccattccatatgcagctctgatacacacagaaagctcatttctattcagtgtacctagacacaaacattcaagacagcaacgtgcatagattcctttgcagatcctccccttactccctccccccaagatgaggtcaaagctaaccatgaacttgcttatgtacctgaagctgaccctgaactcctgatgtctcagattacaaacatgtaccaccatacctggcctctatttttggtttttaagatgaggtcttcctatgtagccctcgtctattcctgcctctgcctcacaaatgctgagatattacaggtgtgtaccaccagtcccagcttggaacactcactttctcatttttagtttttctttttcttgtttttcaaaacagggtttctctgtgtagccttggctattgtggaactagccctgtagattcagagtctgggattaaaggcacgtgccaacactcccagcttggaacacattttttttttttttttaataaacattatttatcaggaggatgggagggagaggggattaggattagaattaaaataagattgttttattttgtactcgggaggcagaggcaggtggatctctgagttcaagaccagcctggtctacaagagctagttccaggacagcctccaaagccacagagaaaccctgtcttgaaaaaccaaaaaaaaaaaaaaaaattgttttattttaaataaaaattaaaacatgatttctctttgttttatgtgcactggtgctttgcctgcatgcatgtccgtgtgagggtgtcagatcttggtattacaggcagttgtgagctgccatgtgggtctgggaattgaacccaggttctccgtaagagcagccagtgcgcttagctgagccacctctctagctccctaaaatgtaactttattggcagtgtggggcatgtgtgccatgaaatgcacacacagaggtcagagctcaactctgtagagtcattctctcctctccccctcacatgggctctagggacagcccttgctatgtaagggctggagagatggttcagttctttaaaaaaaacaggttcccaaccaaaaggacataatgacaatatgtgagactcagactgaatgatacacttaaaaggatgggtttttctcttccacagaaaagaccttcaaagccagctgacaattattcaatttactggtaggaaatacagcacatttcattaactcgaaagtatcaatacagccttgccattgtgtattaagaagtaaacagtgagctggagacaaggctcaatgttcacgaacacttgctgctttatcacgaggactggatttggatattagcacccacatcaggtaactcacaagcatctgcctgtaactccaagggatctcttctggtctctgtgagcaccctagatgctaatatatatgcacataaaggcagacagacagaaagacatacacaatcacacaccaccaagtggtggcatacattatttagtcttagcactcaggaggcagaggcaggcagatctctgtgagttcaaggccagctcggtctacactgcaagttccaggacagtcagggctacagagaaacacccagtcttgaaaaaaccaacaacaacaaaaaaggggtaggaggcctttgcttcccttcccccagcggccacacactttcttggttctcctggtccacttgccctctcttctctcctcttcctctcttgtaccccccccaccaaggccctgttcagtctggactcttctagatgcctctggctgttactccctcaaatttacaataaaatccttctcctcaaccaccaaacaaataaacaaccactaacaaaacaaaataaacacataaaacccaaaagttaagcaggcatggtgatgccagcacttgtaaagtagtatatggagctctgtgaatttaaggccagtgtgctccacacaggtagttccaggcctgctgggtgacattgtaaaccctgggcttaaaacaaacaacaaaaaaggtgctaaaagtgaagccatgtctgagaattgatgaaacaaggcaaaaggacaccacctagtggtgaccagtgtaattccagagcttgctggggagaagggttcctgtctgcactgttttcactaagcagctgttggggaggaagtacatctttgaaaactcacagtggattactctgtgatcatagattttgaaggctcaggaggatgctgagttcaaggcagcctgagctacagagtgagttccaagccaatcacagaaatgagaccctatctcaaaactaaacaactaaactaaaaaggggctggagagatgggctcagtggttaagggtgctcttccagaggacctggctttgattcccagtgcctataaggtaactcacaaccatctgtaactccagttccactggatccaatgccctcttctggctccacgggtaccaagcatgcatgtttcatgcagacatacatgcaggcagaacattcatacacataaaataataataatttgaaaagaaatggaaggggctgggttggtggcacatgcctgtaatcccagtgttggagaggtacaggcagaagatcatctttagtttggggccagcctgacctacatagcaagttccaggtaaccaagagctatatagataataaacatatatacatatatgatgttttttcttctttcatatgtaatttttttaaagagggaaaacaaaacaaaaccaacatactgtgtctcctgattggcttccctccagtttagcaatggggacacttttcacattttctccagatacagccatggcagcactgtccccactagtcactcctgtctcttggtccttctgtgtgggtgtgggaccctctgtctcctttgccgaggtctcttctgtttctgtgtccatcttcttttcgctgtgctctgtggcacatgtctctcccagctcagtttgtgtgttctccagaatgtcctgcccagggtcagggtcaggcatgtctttctgaagcttttccggagacttggagtgtgtgctcaatcctgagctctgaggactgcaaggacggtcaactgccacctcaactccatcactaccattttctggagcacagcagctcgggccagaccccgaagtaccgggggcttcatcactgtcgtcatctgagctttcagcgctggagccctcagcagcctccagtccttccatgcccaacctgtgggaaacagcagaaaggtgtgacaccatttccaacctgtacctcgtaaaagtacgggttgcctggagatggcgagtaggtaaccttcagaaaagtatattccacagatgtaaacagaaggaactgcattcaaccatgtaaaacccaacaggagtgcccatgcccttgctggagtgttctccctcagtacacacgctcttccttgtattttctcttagttccttctttaaattatgattcttttaaaattatgcttgaggggctggagagacggctctgaggttaagggcactggctgctcttccagaggccctgagttcaattcccaacaaccacatggttgtctcacaaccatctataatgagatctggtgccctcttctggcctgcaggcaggtagaacactgtatatataataaataaatcttcaaaaaaaaaaaaaattagctgggcgttggtggcacttgcctttaatcccagcacttgggaggcagagacaggcagatctctgtgagttggagaccagcctgctctacaagagctagttccaggacagcctccaaagccacagagaaaccctgtctcataaaaccaaaaataaataaataaataaaattatgcttgagattttccctttctatattaatcccaattgctgacacttagacacaataaaagccataaagaaaacccttgggtctgaggatgaagctcagtggtagaatgcttgcttagcatgtgtcaggccataggttctattcctagtatcagcaagaaagagggagaacactgtaatctttattcacaattgctgtgctggatagtttatatcaatttgacaaagctaaagtcatctgaaaggaggggaccttagttaagaaaatgtctccataagactgggctggaagacaaacctgtaaggcattttcttaattagtgattgatgggaagggcccagcccatcaatggttgatgccatccctgggctggtggtcctaggttctataagaaagcagactggccaagtggtgatggcacagacctttactcccagcactcgggaggcagaggcaggtggatctctgtgagtttgagaccagcctggtctacaagagctagttccaggacagtcttcaaagccacagggaaacctgtctcaaaaaaccaaaacagaaagcagactgagcaagccatgagagacaagtcagtaagcagacctcctccatggcctcttcatcagctccagactccaggttcctgccctgacttccttcagtgatgaacaagatctgggagtataagtcaaaaagtttctttcctcttcgaaaaacaaaacaaaaaaacgaaaatgaaaaacttgggaaaaaatgacaaagactattgttatgtgatgtttcactatgaagggagaaaagctgtcctttcaggtgccaggaaggtaaaggcctgacatggaaataggaaatagagccaggatccctggaactcactggttagcagatctaaccaaacagatgagttccaagttcaaaaacgaggtgaaagcatcgaaggaagacatcaatgctgacctctggcctccacacacatgctcatgcacgcacacaaacacaaacttgtatacacaaacacttgtcattcagattctgtccaatggtatccacagcagaaaacactactgaggtgcacaggttgccagtcaacaaaacctgaagactaaagtactctgcaaacgagctcccatcaatgctacctaaaaatgcgattgttcaagcctgggtgtggtggcccatgttggtgatctgtgactcaagcagcaggctgacacaggagaatcccaaggttgaagagtggcctggcagatacagcaacacacacacgtacgcttgtgcacagacaagagggaaacattataccgtcctcaaagaaggacttaccaagccgggcattggtggcacacgctttaatcccagcattcgagaggcagaggcaggagggtctctgtgagttcaaggccagcctggtctccagagtgagtgccaggttagactccaaagctacacagaggaaaccctgtctcgaaaaaccaaaaaaaaaaaaaaggacttaccaaaagcatttccttttctttgctccagcttcctggtctgcctttgacttgttaggccgtttccgagtctcactgattcctgctgacaccatcttgctggaggcagcctgcatacctaagtggaaaatgtaatcagtttctgtaaggatatcatctggattgcagaaagtgctataatcttttttaagaactttgtttgtttggttttttggtttttttcctgagatagggtttctctgtatagctctggctgtcctcaaactcagatagttccccaacctttgcctccctgaatgctaaaaaaaaaaaccttttaattagggtaacaaatttccttatgtgttttttcatacatatttagttatggctgttcctacctgatgagatataattttcttcatgccaaatttttatatggttatgagattaacctcaaattcaaaaatatttcagataagcattatgaaaccataactgtctgtgacaaggtctcaatcagccaagccagcctccacacactgcggctcaagatgaccctgatcccctgaccctccatcatgcccagctaggacagcaccacagcaccttcatttatttatttgtttgtctttcaagacagggtttctctgtgtagccctggctgtcttagaacttgctctgtagaccaggctggcctcaaactagaagagtcacctgcctctgtctcctgaatgctgggattaaaggcatgtgacaccactcttgtttatttttaagggatggggtttttttgtgtggcctggcagcctggaacttactgtatagactatgaactcacactcagtctgagtactggaattaaaggcgtgtgctaccacatccagcttagaacaggttttttcgttttgttttgttttcagtttttttgagagggggtttctctgtgtaacagtcctggctgtaatagaactcactctatagacaaggctgaccttgaactcacaggttctgggattaaaggtgtgtgccactaccaactgtcttttaaaacagtattttaaaaacaccaatgtgcaccttgaagctgaaggttcatatccaacagctattttcatgcatttgcctttcctgtcctagcaccgcctttttgatgaaaaggaccctttaaatcaactacattcataacaggcctgggacactgcttaaaagaatatgctgaggggctggagagatggctcagaggttaagagcactgactgctcttccagaggtcctgagttcaattcccagcaaccacatggtggctcacaaccatctgttatgagatctggtgccctcttctggtgtgcaggcatacatggaggcagaaatgttatatacatgataaataaataaaattaaaaaaaaaaaaaggaatatgctgaggttgctgggtggtggtggtgaacgccttcaaccccagcacttggaggcagagacaagcggatctgtgtgagctcagtcagtctaatctacagagctagtcccaggacagccaaggatgttacacagagaaaccctgtgtcgaaaaagaagtttgtatacagttcctgaaggcttcgaatatccctacactgtacaaaaaaaagaaaagatggactggagagatggctcagccattaaaggctaagctaacaaccaagagaaaagatgctcttccctggggcccaaaagcctaagaaatttgggggttaggcctgccaaatgttttctctgtgttgtgttgggtgtaggttttagcattcgataaaagaaggggtccaggcaggcagtggtggtggtgcacacccttaatcccagcacttgggaggcagaggcaggtggatcgctgtgagtttgagaccagcctggtctacaaaagctagttccaggacaacctccaaagccacagaggaaccctgtctagaaaaactcaaaaagaaaaagaaaaagaaggggggggggtccaaggtgttcattccaaagtgatcaaggccactcgtcacagtgagtgagtggtgtgaagctcatggctccagggcctgcagagcacagaggaaatctcactctcttacctttgaggacggaatcctccagacgctcagccatttcatggcactgcctctggtagtcggggctggtgaagtagtgcttaggctctgcaagctttcgctgcagtctctccaggcgcttttgctccttttcagcctctcgctcagcttgctgttttacccactcggccatcctggggaaggatggagatgtaactgaatggatgtatcatacatagcatttagatcagtggcacaccacacacatgaagctgacacaacactacaatatagatgaaaaacttattgctcaatggccctgtagtcacagtaacacttgctccctgtttatggtgatgtgttattaaaaacaaaacaaagccctccagctctaagtaacataaaagtccagaacagtcatgcacatgacacaatgcttgctactgtactattactgttggggtggacagggtgatcacagggatcaaacccaggactttaagcaaatgctctaccaccaactacactagtgttttactcatgctcctacttattaagtcaagttgacttataggcctggcgtcacacacctttgatcccagctgctggaggcagaggcaagtagacctggtctacacagtagttaaaggccagccaaaactacacagagagaccctgtctcaaaaaacaaaaacacaacggacaaacaaaaatcaagtttactgtgaaactgtattccatttctcatcagcaacacctcacaccacagcccgccaatctcttcactgcatcaggtgatcgattgtaacgcctggtttactagtactccctctgcggcacttgcacccgggactcctattcatattgtaacacttctccagaaaggtgtaagagacaactacaaagcggatatcttacgctttctcatgattgacatcgcgtaatctcctcccactgagatccctgcaggcttctcgattggttgtcttctcaatctgagcaccgagtgctcgaagcatagacccaaaacctgaaacaaatgcaggtatggattaagtggttaaggatgccaaggactgatacaagccagattatcacaacactaaaaataaactccacattcttcctttttcgttttgaaaaggagatggacatcaaggtttctacccaggatacaaaggtattgatcactttgattagttttctgttttctgcctttcactttgtatttctgaaatgctgtacaggtaggatcaatgaaaggctttacccaataccagagactccaagattcctaggtaaagaattatgtcagtaaagtgcatgctgtacaagcataaggaactgagttctggatcctcagcatccacgcaaaagctggacacaagggcacgtgcttatagccctagcaacacgaccagaggatccctggagctcattggccaaactgataagctccagggtcagtgagaaatcctgtctccacaaataaaatgaagagtatctgaggaagacagcccatctcaacccagcctccacatacatgtgctaactcacataggcactcctacacacatgcacaggaacacaaacacacaccagacatacggaatcagaaaatctatgtgttgatttataaggtggctcattgtaggaaaccctgtgcctttcccttggagtacaaatctgccgtaagaagcacatcagattgcccactagcagcatctccatcagctatgggggtgggagggctgcttggttttttgggttttgtttgttttgttttttttttttcgagacagggtttctctgtgactttggaggttgttctggaactcactctaggctggtcttggcttggctgtttgttttctgagacagggtttctctgtatgtcagctctggctgtcctagaaccgatttgtagaccaggttggccttgaactcacagagatccacctgcctctgccttccaagcagtgggattaaaggtgtacgccattgcctggcctttgctctctttaaccttaccagtttatagccaggacattaatccacctggcctggcaagagttgtttctgaaggtgactttgggtcaccttttgggagacaaaatcttgacagcaacagggtctgactgtttcaaagtttgcccttcagcaaactagaagggacaatggttacctttcatgactagttctccctaaactattggagccaaggctctcaaagagcagcctgcctggaaagctggagtttgtatgagttatttttttttctcaaaaagaataaaccaaaaagattacccaaaacggagtaaaaatgattttacaaagcaaaactaggctggtataccagagaccaacaagtttgttaatttcaaacacactgttagaaaccagacatcacatcctacctcctttccctccacaaagtctgggctccaaggtgtagacagctccatgctgcaccgtgtcgctagcagcaaccaggactccattacatttcacaaagaagcagtccgcaggaattgcctagagacaagattaagtctttaatgcctttatgacaccagaccagacctagtttattcttcttttattaatcttgttacaaacagataacaggttggattactgtttgttaagctgaaaacatcgactaaaccagtccttctctacgattgggtgcattttcctactgtgaccttctttctctcataggtcacctgaataggtcacctgtgtagcagactacaaagggctcagatccagtaatatacaagtttcactcatttctcctgacctttataaactcataaaaaaaaaaaagtcattttaatatcaaaaccaatccaaagcttaaacctgccagtcatcctgacttgtgtaggtagggagaaggtagaggcaagggtatattttgggtgttttgttttgtttttggagaggtattacaccaccatgcaatctattctggattcacatttgcaatcttcctgcctcagtcttcacgggcagagatatcaccatgctcagtgagtttaggttttactctaaataaaactactggcctggcaaggtgatcaatgcctttaatcccagcactcaggaggcagagacaggtggatctctgtgagttccaagacagcctggtctacatagtaagttccaggacagccaacgctacaaaaagagagaccttgtcccaaaaaccaaaccaaaccaaccccccctccccgcccaattgttgtcaatataccgatgtcacttaaagccatgtgactgtatacaatcacgtgagaggaaaagttatcaggaaaaagatcagctgattaatgctgataacttcaaaattaaaaattagggagaggagccaacagccatggactagaaaggaggccagtgggtggaagagggttgatggtgatgtatgccacagtcatggccaattgtgtctcgtgataaactcagtatgtgctgaaaactcaaaactgactacacttccgttgtgatgaacacaacgaccaaaagcaaccaggggagggaaggattaatttcagtttacaccaggtcatctctgaagaagtctggcaggagctgaagcagaaaccacggagaagcgctcctttctggtttgctctctggctacttagctggctttcctattcatcccaggcccacctgtctgggacggcaccactcacagtagccttggctttccacggcaattagcaatcaagaaaatgagtgccagacaattccacaaggcagttaacagagacaaacccccagctgagaatcctgttcgataactcttggtatgtcaagttgacagctgaacctaactgtgcaaagaaggtaattatttatagaataatgacagttcacccacagcgatagaaggctggaaggcagaagcactagcaggaagacaacaatctctatcttctcagtgaagagaacatacagaagacaccactgcaaacaaagatggcaaggggaaaaccgctagggagctgaagccatcaacagaatgaatggcacaaagggctacacttgtctgaaactgtctaccttacactgtaaagattcacctcacgtttataaactaaaaaccactttaggatctttatatgtaatatatatggtacttccaaatttgttgtttcgtttttgtgtttttgagacagggtatctctctgtagcactggctgttgtcaaacacacctgcctctgcctccaaagtgtgtaccatcaactggctgcaaaactttgaaagacatgaatgtgaaggcagaaacttttatgttcaaacaaaattgcttagttagaaaaaaaataatcaaagctgtatttcttcaaaaagattttttgaattatttttagttatgtgtaggtgcattatgtctgtctacgtgtaggtagggcatatcagtacagatgccctcagaggcagaggcatgctgttttgctttgaaacgggattcaggtagtccaggctggtctcgaattcactacaaagaagaggctgataactcccaatccttttgtctccatttctccagtgctgagattacaggcataaaccaccacacccagctttatttctaggtcctctaacaaaaatgtccttaacacttttcattgttaagatcctactgttaagcgggtggtggtggcccaaacctttaatcccattgctccggaggcagaggcagaggcaggtggatctctgtgagttcgaggccagcctggtctacagggctgagttccaggacagccggaactacacacagagaaaccctggctccaaaaacaaacacaaaaaagctcacaactttagaaggccttgaccagagtttcataaagacaccactttctgcctgttccttttctccatgtttatttatgaaagtctcaagaaggccaagaacctatggtgtcaacagaacccgtgagtgactgagcagagaccccatgaatccgtgtccttctctaaaagtcctctggcctggatctggccatggccggttctctaggttggagctaacagaattcccaaatgggtggataaaaaagcaacaatcctattcataatttagggataaagaaacagaactaagagtttctaatccaagttggacaagagtcggaattggattttgctttttcttacgacgtgggggccaaacaactacggccatagagccccagaggaaagccccagtactgatgggcagcacccgaaaccggagaatccgtagcctcaaaaccggaagagtcaggagagcagaagcacccacgacgacaaccccggcccgtccttccccaccttccggcagccgcgacgctcacctgttcccggcagtgtcgggagataacgtcacgcacggagcagctgtccgaggcacacggcagcgccctgcacccggtgccggggccgcgaacccacgccagcaccgcagcctccgccatctcgccggtgacgagcctccagccggtgacaagcacgaagcgacaccaccgcctggacgcatcttgatgacgccaggcctcagcctccagagccccgccccgcgcgtggccacccaccccgcctttccggagggcggtcacgtggcccggcgtcgcggggccggcgtgggggaggggacaggaaaggcctgccggaggccgataaggcggcccagcgcgggggcgaggcgttgctaggggcggttgctagggcggggctcgagggaccggctataaagggcgggctctgggcgcggccgggcgcgcgggctgccagccagcgataaggctgccggggccccgccctcgccgcgggcccggcccggcccggcccagcccagcccagccgccggcgtttgtgtcgctgtttctgggtccgggagggctgtggcccggcaggccctgctcccagatgctgcggggatggcgcgggctccgtggcggggcctcccggcccccccccggcccccagtggtccccctaaccgcagcctctgccgcgtcgtttcctgccgctgtcgccccctccgtccttgcatcacgttcggctcgttctcgttgttgcatgtttgcgctcggcgctgtccccgcttctgctgtgtttccaaaatatttcacagcaaatgggcccttgtgaaccgcaggggcgggaatgacgtttatagccacgctgcttccaaaaaacctcgctgcaacgttctttctgcaccatggaaacactcgcgcagattttacagagagtaactttaaggttcgggcgccgagggaggcctttaatatttaatatgcgggatggtggtgtttctaaaatactgaacaatttaaagctgctagtgtgtgaagctgggaggattatcgggcggtaactccatctcctgaacacagatgccctggcccacagaaccatgctctctgctgttcagatgcaggcagatggaactaatcaccgagggaaaagcacaagctctgaaatcctttaactgtgagaatgaaaataggatgctaactcccttgaagttatagatctgttgttattacacacaggcgggagacagggcctcggtgatgaagaaaattacacgaagtatgttgtatcggtgggcggctcaccaatatgtaaagccggataaactgggaagcaaatgatcttcaatcttttcccattccatactttagagtgtagacctaactgcttatttactatttccacctttgggaatcagaaatgaccatttcgagagtctggcagcttctgcctccgcaaataaccagataatggtcagtttggggttatgtaacatttccttgtcaggataatgctttgtaagctggaaggttccagaaggatttccttctggcaaggaaagtccacatcattttttactaacattcaatctactactcctcaaacctaatatctcaataagttcactttttataccttggttgtgtttaatttctgttatgaaaaagtcccaagtaatgagcaagcatttgtcatttaaaatatgaactaatcattattaacttttcagcgacacaaacctcttgagcaatctgaaaccttcacagtgagctccacacactgaaatacacaacgcagacgttacatagatgttagttgcatatttgatgaattactatctaacacttaattattcccagtgtgcatctgaagaaacattttccactcactgaacattctacgctaaggatacagaaatcaacttgaactggcctctataaattcatctaagtaatgggagaaagtgaggctttagaggctaaaggagtggctaagaacacagtgcatattaattgaggaaagatctagagagacaactggtttagcctggtggcttggagccatgttgtcatatccagtggccagtggtatggggtgaggccagtcagtgattgtgtaaaaagagacttactgctgccaccttcccagtctcatggtgtcagatgaagaaatgacaggaaggcacgtgtgtggctgtgacaagttaatggtgagtgggggggggggtggcagttcctcagttgtcaaaatcatgcagctgtgctcctaggactgcacatttggtgctcttccagagaagccacattggctttgttcccgccttgttcccaaaagaacactccagctgtacatctgctttttgaggactggttcagctgccaccagagggacatgatgagagcatcctgaggcaatgtggaatgattgttcactgccaggaaatgacagcacaagacaggcaatgtttgtgtggcaacccatgataggggcttgattgagccaaatgtcatgctgttctgtgaggtcaggaagcagctccgggtaccggcactttccacaaacaacagcaagactcctcaaccagtgactttccaggttgtgtccatgtgtgacatgccaggcacccttctgtgttttcagccatgttcaggctcagcagaaaggaaaagctattaatatcattttcatgacaaaggacaatgggacaagctgactcctctagtgccagaaacgcaaaactgccatcaactcccacattggcaagtgttgtcgtataggatggctgcagccctaggagcaatgaggtcggctcctggggtggaaaaacagcatctggggaagagcctaggagtccacactggcggtggatgtgtgggaggcggagcctggagcaagccccaagatgtttggctgccagggaaagcaaaactccactctccttctcttattggatagaaaatcacaggaagcatccagggtgaggtggaaacagaggtagaaaaggctgtgtttagaacactgatgcttcgaaaaaagagggcagaaaaggcagcagagcagagattaaaaactggacccacagccaatgctgaatctagaaggccaagcccacttctttgtactaccaacaagcacctccttcatagtggacaccacagataaatcctatccctcctgtggccttaaatgccaccagagtctgcattataacagaaacgctagctcacaaccattctgtatcattgttctcaccgacaccatcaagtgttttgtttcattaagaaatctgaaggcaggctagggaaaccactcagtgaggaaaggtgcttgcacccaagttcaagcccctggactcacatggtggagagacctgacaacttcaagttgtcctatgacctccacacacacaccatgcccaccgagtgtgcacacagacacatacagattagtgtaaattttttctttttttaaagattttatttttttgttttttgtttttcaagacagggtttctctgtggctttggaggctgtcctggaactagctcttgtagaccaggctggtctccaactcacagagatcctcctgtctctgcctcccaagtgctgggattaaaggcattcgccaccaacacccggcttaaagattttatttattaagtatacaacattctgcttccatgtatatctgcacaccagaagagggcaccagatctcattacagatggttgtgagccaccatgtgcttgctgtgaattcaactcaggacctctggaagagcaatcattgctcttaacctctgagccatctctccagccccccaaatttttcttaataaaaagaaatttgagctgggcagtggtggtgcaagcctttaatcccagcacttgggaggcagaggcaggcaaatctctgtgagttctagaccagactggtttacagagcaagttccaggataggctccaaaactacagagaaaccctgtcttgaaaaacttaaaaaaaaaaaaaaaaaaagagggctaaagagacggcttggtggttaaaaggcttgccaccacacaagcataaagcctgaaaatgggatctccagaacccatataaatgctaagtgggtatggtagcccacctgtaattccagcactcaagacagcaaaaaccaggggactccccagaacaagctggatagccaaattagcattattagtgagttctaggtttgtttgtttgtttgtgtttgtttttttggtttttcaagacagggtttctctgtggctttggaagctgttctggaacttgctctgtagaccaggctggtctcaaactcacagagatctgcctgcctttgcctccagagtgctgggactaaaggcgtgccccaccaccacccggcaagttctagtttcaagtaagacactacaccttaatacataaggaaagtagcaagggatgcaggaagatttatgaaatcaattttagttttccatacacacatgaacacaaacaaacatgaaaaacataaatctgagccaagggcctggggtacagtgctcgcctagcattcacaaagcctgggtttcagctcaagcacccccataaacctagcatggcagcataatcccagcacttcagaggtgaaggcaggaaaatcaaacttcaaggttatccagggctgcacagaattggcaccagctgggatacatgagaccttgactcaaatcaatttttttaaagaaaaaaataggagccaggcatcatggtagatagttgtctatgcctgaattcacagcactgagtggtgggagacagaggatcaatgtttagctgaagaagatattggatggacatcgtctggcttgtgtgcatgctccgagacacacacacacacacacacacacacacacacacacacaccacacggctgttcacacacatggccttgaaggggactatggaccctggcttcttccttctttttattccttggccatgattagcctaattcctgtcactaccaccctgcactctgactagaggcctacaaacgacagaaacaacaggtggaagctctaaaaccatgagccagaatgtacctggtttttgttttatttggttttggttttggtttttggtttttcgagacagggtttctctgtgtagctttggagcctatcctggcactcgctctgtagacctggctagcatcaaactcacagagatcctcctgcctctgcctcccgagtgctgggattaaaggcatgtgccaccaacgaccagcgaacctgggtttttaaatcagttgattatttcatatcttttatataaagatggtttgcacataagcgtgtagaatttttttcacacacacaatcacattctatttcttagttactagaaccaatgctggcaagtggggtcttactctgtcttagttagggtttctattgctgtgaagacacaccatgacatccgcaactctttttttttttttagatgaattctagttttaattttttttattttatgggtattggtgttttgcttgcatgtgtgtctgtgtgagggtgtcagattacctggaactggagttacagacagttgtaagctgccacgtgggtgctgggaattgaaactgggtgctctggaagaacagtcagtactcttaacagctgagtcatctctccagcccccaacaacaattcttacaaaggaaagcatttaattaggactggcttacagtttcagaggtttagtccattgtcatcatggtaggtagcatggcagcatgcagaaagacttagtgctaaagatgtagcccagagttctaaatcctgatcaactggcagcaggaaaagagcgtaagtcactaggcctggcttgagcttctgaaacctcaaagcccacccccagtgactcacttcctccaagaaggccacacctactccaacaaggccacaccccctaatcctttcgagtaatggcctatgggggccatttccattcacaccaccagatgctcccttctttcacttgagaactaagataatggctcaacggaaagacatcacttatcctctcacgctgatttacagcatcagtaaccacagaggaactggctgtaaggatggaagtctgtatcgtcacagcacacgccgtgaatactcagtcagcgttcaggctcatcatacctccctcttgtgctgatgcagcgtctcaggtgccctggcctctgacctgaatgaactcccatcactgtccttgaacctgagattcaagggaaagttcaagcacataggctgtgtctagatcttctctaggcctgttttaatcatgccccacccccacagagtttctctgtgtagccctggcaatcctggaacttgctctgtagaccaggctggccacgaactcagagatctatctgcctcagcctcctgagtcataggattaagggtatgtgccaccagtgcctggtttaatcactctctttcttagtagattttgttggcaatatagcaggatctcctcccttggttgtctttcaagagcactcctcttttgatcttagtaacaactcaaacctcatgggactgcaatgtgcagctcggtggcagagtgctttctggcacagtcaggaccctatcttccatctccatcactgaaagggaaggatggaagttagaaggaaaaggggagagataaaaggggtagaacccaaatatttactgggaatagatggaaacattgtgttatgccttcagtgaggggccagcaagatagcccaacagttcaagacacctgacaccacacctgataacctaagttccatccctgtgacccatagcatagaagagaaccaaacaccataagaagttctttgacatcctccaccccacacacacactgtggcacacacatgaatcccaaacaatctgttgagtttcagaagcatattaaatgagccccccctctctctcttccctctctcctctcttctctactcctctcccctcccctcctctcctctcctctcctctcctctcctctcctctcttctcctctcctctttctctgtttttttgagactgggtttctctgtgtaagagtcctggctgtcctggaactcaaagagagctgcctgcctctgccttgtgagtgctgagattaaaggcatatgtctccatgccaggctcccagttgaatttttagaaggcagaaaaagataatgaaatgtcactgcttctgtccatcttgagccacagtaacaaaacacctgacattgtgtaacataaaaggaagcattattttggctcacagctctaacccaaggtcatgagagcctatagccagagaaggcctgcttgctgcagaaccctgcaacagggcagggtgctagatggccagagacaggcagacccaagagttccagccacactggtgtttagagctgacccactctggagggtggctcattaatccattaatcccacagatgggttaatccattcatttacacagagtcctaatcacctgtgaaaggccctgcctcctaatgtctcctaatgcagattacagtttatcatgtgcttggggcatgagccatatccaactctgtcttcctctggaaggacctagaaccctttctgtacacctttacttactctgccaaggttaaagaagatgtgtgcctgctttccattctctggccctcagctcttctacctaccaggtgttcccctgagctgccagactcccctggctgcgcaaggtaggattgctgagcccaggggaagatttcctcccagtcaggtggccaggcagtcacatccctcatgtcagctggcccagggtgcttcacacggtgtgggaagctccttgccttccaggctggcaggagcacctgaatcaagaaaggaattttggctccagcaagagatgaaatacaggtagaaaacttcaatattaatggctagctcttgaggaagagggggaaatgagaaaatttctcatttttcaatacaaaatctggtgtgcaaagacaaggcagaagacaaaagcagctttaaaaaaacaaaaacaaaaacaaggttccactctgtgccacagtggccctgagctcacaaaaagtagtccaggttgttatcaaactcccagcaattctcctgcttcagtctctgaagtgttaggattacaggtgtgtgcaaccatggtcagctaagagtagcaacttacagtaagatccaggcacacttgtaacagtggaacgcgtactcccaatttcccccatccagcaatgtcccccaccgtgggccaatggttgtcaaggttcaggccatgcaggggttaaaatagacactgggcgggccgcccaccacctctgattctgatcttccaagaccagtgtgcatttctgacctggtccctggtgatgctgccgcttgccagtgttgagattcgagggagatagatgttcaagaccaggagcaagaactgtgcgaagcctttggaactcattctcccgatgctttctgaggaactgccgctgtttctagagtgctaagattaaagtcatgtgccaccaccatccttggtgacatgagtctgaaaccagtctgatctatatgagacccctatctcaaatgcaaacaaacaaaaaccgacttataccttctaggttcaggtcagggacggaatctttagtgaacttgctattgtcctttttattaaatcacaggctttctgggcatgccaatcaccacagcccgggaatgcctaatctcacacagcagtctaaccaaagatgtccctcaaaaaccaggaaatgactgacctgatctgatctcctgaaggaatgagcatttggtgtgagcattgtcttggctcattgtctattagatatttcattcctcaaaatgcaaagcaaggcagaggcaggcggatctctgtgagttcaaggtcagcctggtctacagagcgagttccaggatagccaaggctacacagagaaacactgtcttgaaaaccaaacaaagccgggcggtagtggtgcatgcctttaatcccagcactcgggaggcagaggcaggcggatctctgtgagtttgaggccagcctggtctacaagagcgagttccaggataggctccaaagccacagggaaaccctgtcccgtctggttaagcccttctttcctatcttcctttcttcctttccttcatccctccctccctctctccctccttcctttcctccctgcctgttcccttcctcccttccttcttccctccttcctatctcacaaatgaggacatttggtctttctccagccctctgagacacaccctacagcatcttatggcttactgcttcattataactctctgagtctgcctgggcctgcacatgtgttggaattcttttctttccatgtaacacgagcagtcacagctttggacacagagaagatgttgtttatgtttagtgaactgttgctgaagtggtaccaatccaagtctcccaaagcaaggatacaggaatacagcaaaggggaaaggagagagggagtttatttccaaggaacatagaggctggagaaaacctaagcttaaaggctaaagcaacatcctctagcatcctctagtgtgagtcacaacaaaatgtcactgataatcaggaaaaacacctgtcaacagcctcatggcttgagttcaatccttggactcatatagtaggagagaactaacacataagctgttctctgatctacacacatatcacacacacacacacacacacacacacacacacacacacacatcacacacacatcacacacacatatcacacacacacacatacacacacacacacacactctcacacacacacactcacacacacacacacacacacatcacacacacatcacacacacatatcacacacacacacacacacactcacacacacacacacacatatacacacacacatcacacacatatcacacacacacatcacacacacatatcacacacacacatatcacacccatatcacacacacacacactaaattttctttcttttgttttccaagacagggtttctctgtgtaacagtcctggctgtcctgaaactcactttgtagaccaggcttgccttgaactcacaggggtccacttgcctctgcctccagagtgctgggattaaaggtgtgtaccaccattgcaggttaataaaaaaaaaaatttttgtttttttgagacagggtttctctgtgtagctttggagcctatcctggcactcgctctatagaccaggctggcctcgaactcacagagatccacctgcctctgcctcctgggtttgggataaaaaggtgtgcaccaccaccacctggctaataaaattttttttaagagatcgtttgtattatccagaaggggagggtgagagggttggagaggaggcgggagaggtagccatagggagagagaggatactggtatccaagaggcttaccaaggatcatgattctcaagtctgtacccttaaaccaaacaggaccctgatcagtgatgactccagagacctgcagctccagtccaggtagactcagcctgactctcacatcagtgactgtggcccacgcgggatgcaggattacgagcaagatagccgtccccagaggccaacaactccctcccgaaggactcctcccagcatctccagttcacttttgctcaggaagccaggggtttgtttggtttggatccttgttgtctccagccttattttcaaattcgctttccctgaacaccccagtgttgagcagccacctctcagccaccattggaggagtagccctggcctcttcccggcctgcaaaccctggaaggtgcaatgaaatgtgttctggggatttgagtcatgggaatctcataattctagactccctgatcgtcctttcatctgaagatctcaaagacacggacaaacattaattattctcgcggcactgctcagaagtaaatagacgttagaactctacctgctcctcacggcttcgttgcctggaccggtgcacttccgattccatcccatcatttactgtgtttgtttgtgcactgcggtactacgggtggtatccagggccctgtgcgtgctgacctttactcccagtctcacagtctcacagtatttactttaaaagatacaactctttccaatcagcaggggaaatgaaattgcctatgttcatagctgtgggtggaagtcccggctgtacaaggaagttctgtgttcagagaagtctctgccctcaaggagtttacagtctggacttcgtaggtgccatgtgcgtgcctgtaaccttgtaatcccagaatccgggaggtagagacaagagaatcaggagtttcagtctaacttctgctgcatatgaagttcaaggccagcatctccggctatacaagaccctgttttaaaattaaaataataataaaaaaagagccagacatgggggtgcatgccttatatcccatcactcaggtagcagaggcaggcagatctctgagttagaggccagcctggtctgtagagtaagaagaagtgctgtctccaaaagccaaaaacagggctggagaaatggcttagttaaaagcactggctgttcttccagggacccaggttcaattcccagcacctgcatagcagctcacaactgcctgtaactccagtaccagagcacctgacaccctcctctgacctcctcaggcaccatgaacatatgtagaacaaatacttacgtgccggcaaaacatccgtacacatgaaataaaaataaatttttaaaaaaggcaaaaccaaaacaaacaaacaagacctggaaagagagcttagcagctaagagttcctgtagagaactcaggtttggttgtcagcaccacacagtggatctcagtcactctcatcacctagaattctaactcctcccctccccccccacccccgcccgcacctcaacaggatttctctgtgtagccttggctgtcctggaactcatattatagactaggctggcttcaaactcagagatcttcctgcctctgcctccccccaatgctggttttaaacagtttaagtttttatctggaaagaaaattaattttttttttgttatttttttgagacagggtttctctgtgtagctttggagcctatcctggcaccctctctggagaccaggctggcctcaaactcacagagatccacctgcctctgcctcccaagtgctgggattaaaggcatgtgtcaccaacgcccagcctggaaagaaaatttaaacattggccagttggtggtggcacatgcctttaatcccagcacttgggaggcagaggcaggggaacatctatgagttgaagaccaatcctggtctacaagagctagttccaggacagcctccaaagctacacagagaaaccctgtctcaaaaaaaacaacaaacaaaaaaattaaacatatataaaaataggcagagcagaacaataaaactttgattatgctaatctcaagtttaacacttaagattttacaacattcttctttgctttgttctagccagggattttaccacacccagctcttgagttgttgctagagcattataaatgattctaattcactctacatatttcattatgtagcatttttttttcttgcatgtaaccctggctggcctggaagttactaggtggaccaggcagtcctcaaattcagaaatctgccttcctctgactctagagagctaggattaaaggcacacgtcacgagcaacacccagctaaccatcttggagcccttagacatatgtggctggttttgtttttgtttttgtttttctgagacagtgtctcctgtagttcaggcaggcaggtgagggtaaagattaacttttcacctccttgcctttccctgctgagtgctgctggcttaccggcatgcactgcgcctgatttcatgtgctgttaggagtggaccccagagttccatgcatgctaggcacgccagcaactcaactacacgcatccccagactctggtatctctctctcctccttctaaattgtatgtatgcgagtgtttgcttgcatgtctgtgtaccaagtatgcacagtgttcacagaagccgaagatgacactattgtagaatattatttttaaatgtgttacatttgtttgtgatgtggaacatctgtgtaatgacgcaaagatgagtttcattctttttttcctttttttgggggggggggtgtttttctgagacagggtttctctgtggctttggaggctgtcctggaactagctcttgtagaccaggctggtctcaaactcacagagacccacctgcctctgcctcccgagtgctgggattaaaggtgtgcgccaccaacgcctggccaaccgtgttgcattcttttatgctgcatttgtttaactctgtgaagctgagttaatttgcctgtttaaaacagctgattggaaaaaaaaaaacccacctgattagtctaacaaagagctgaatggccaacagcaaggtgggagaaaggataggtggggctggcagagagaataaataagagaaatctgggaaggctaagaaggaatcaagagagatcaaggatcaagaaaagaaggggtcagccacccagccccacagtcagccacagagtaagagtgaaggcaagattaccgaagaagcagggcagtcgtggtgtcggcacacatcgttaatcccagcacccaggaggcagaggctggatgatctctgtgaatttgaggccagcctggtctacaagagctagttccaggacagccaaggctacacaaagaaacactgtctgaaaaaccaaaaccaaaacaaacaaacaaaaaaagatttcatttgtcactgggtggtgctggcatatgccatcctagcactcagaggcgggtgaatctttaagtttaagagcaagttctaggacagccagggctacacagacaaacctgctcttggagtggggggatggggtgtggatttcagatttcatttgtcttttttccatcctgcaactttgttttgacattatttaaacacattccttctttccttctctcccttccttccttccctctgtttgtttttttaaagatttttttttaaagatttatttattatgtatacaacattctgcctccatatatccctgcaggccagaagagggcaccagatctcattacagatggttgtgagccaccatgtggttgctgggaattgaactcgggacctctggaagagcagtcagtgcccttaacctctgagccatctctgcagcccctgtttgttttgtttttaaatgcagtctcactctgtagtccaggcaccttcaaactcattgtgatcctcctgccgctgtctctcaagtgttgagattacaggttcataccacatgtataactaatacatatttcctatcattagtctccaaaaaatacatcataacaaccaaccatctgcattatatttacactgtatttgatattcacatctagaaatatttcaagtacacagaagatatgagtaggctatatgcaaatattacactattttgcataaggggcttgtttggtcatgtacagattctggtattccaatggataccacaacaaatccctcatggctattgaaggatgactatgtatgtgtgtatacaaatacaaagacatatatacatacatgcatacatgtatgttctcacacatacacacatgtacaagtgtgtctatacatacatatacatatgcagcctgttgcatttgacttatgtgtaaaataatagaaactttttttgtgtataatgaatttcattagtgtacacatgtttgtgtgtatatcctactcttacaattttttttttttttttttttttttttttgctttttcaagacagggttttctctgtgtagctttggagcctatcctggcactcgctctggagaccaggctggcctcgaactcacagcaatccacctgcctctgcctcccagctacaatgatcatttttgttggaagacgtaacagaatgaaaagtaaacttagggcaaactaaaatgtacaacctctcaacaggtgctacaaaggctgtggattttaattattaatttcattttttcccttaatcattttttgggagaaaatatctttttcagccgagtgttggtggggcatgcctttaatcccagcacttgggaggcagaggcaagtggacctctgggagtttgaggccagcctggtctacagattcagttccaggacaaaccctatctcgaaaaaacaatatatatatatatatatatatatatacatatgtatatatatatatatatatatatatatatatcttcttctcttgttcttatccccttctgtgttttttctgtagctgtttctccaatgtgtcaattgatggtattttatttaggctgatgaactgtaagtagtagattacactgaagataagaacaattccaaaaatagttgtctgcctctctgttttttgttctcccagtaacaaagctccctgcctttaattatagcttgagacagtgtgttgaaatatttattctctgagtaatgactggattttcatttcctaattggcatatgtatttaatacccaaatctgagaatgagaaggtgtgggctctatgtagaacgcttctgatacctgcccctaagctccggggtagcggtgttagaatacacaagagaaggacaaataccatatatttaaattccacatacttaacgcttgaccaacaacgctagggcttacaagttaaccctcaaatccatgtgtgatctgcagcacacagtgaagtataagtgtatcaacccaaagaagcccttggtctgggaacatgccttacttattctgaaatggaatgtcaggtccttgggagcagttcccacgagataatgctccacccacactggtgacttattgaggctggcttgcaagcactgggagagtagggttagatggagagattacaggcccaacaccatctgcctggatgtgtttccctcagtggggaacccacagaagtatctctcgggctccccacccccatgatcattagctgaatgttgtttgaaacaagacaccacctttcatttgcaacacacctcttttgggaacccacgcaacacaccgtgggtgtgaggccctgtgagcacgttccctggataacgtttattccctttggtccctttggtagtgtttatctagcctggagttgaaagtggagcaagaggcagatttgcagagcctagctgtggtacaagaggccacatcacagatgctgacaggccctgtaggtgactggacagaatcactccttccaaggtggagagggagaagagtcagtgtgggaaacagcctccctctaaatctaacagcagcatcttggggcctgagcaggaatccaggacacagtcaatgatgtgttagaagcattgggtctccacattcacccagagaccagggcatccatccatgatcctcagaagggaatctgcactccttttcacacaggagaaacacagcacaggtctaagatgggagcccttggaggtgatatagttagggactaaagccagccacacccaaacacaagagcttactcatgaggatccaaacaaagccagttctgggcagggctcatcagccccagaggactgcggaggctggagtctgtgttgactagtgtggctgcccagagctgttctcatcttagtcattcccaggcacaagctagagccagaacctgtaccatatccaattctgaggaagaggatgcaaccaggaaccttacacaccactgtgctttctcccacaacccctagaagtcagaaaggggctccattccctcttgggcccagttgtgtatctggatgcaacgaccacgagatttattcagccgtatcgtctaacagcggaggggaaagaggacagtgcagtagagaaggcctctccattgccaccattattaccctcagtgctgacagctcgaaggtatgctaagcctctaaaccggaagcttcatttactcctatgacaaccttgggtgtggctcaaggagaccggaagtgtgggctagaagtgtagcaggaaacacagacaggaagtagactataagtagaactaacgcaaccctgggtgtctaggaccaggtgggtgttggaggctgaggtccctgctcactgctcttttgtttacctctagcactgggtgggatgtttctggtgcattgtaggattttgctttggtagtccctagcgcccgttgctggcctctggtacttggaaggataatgggagaagaagacaagctattttctttacaattagacagaacaaaactctctttgcatccttcctgaatctaccccaccccaaaggaacaagatatttttgcttagatgaatgaaatctaagtatcttgccaggcagtggtggcacacgcctttaatcccagcacttggaaggcagaggcaggtggatctctgagttggaggacagcctggtctacagagtgagttccaggacagctaaggctacatagtgagaccctgtctcaagaaacaaaaacaaagaaaaaaaagaggaagaagaagaaatctaagtatcttaattgcaaacaactgactgctgacttgggaacagttggggtagagagagacaccaccttcttcagggtgaaaaggtagctcttattcaccccatcttcatagtgtacacagggtttatttcacagggatggattatggcactcgggagtcacagaatactgagtgttacagcttggatggaaaggtattctggcaatcaggagccaaggaatgccacaggtcacataagcatagcaccttacagccctgcttcagggagaggattctccagtgtaccagctctgctccaacaggagagggtttacccagcaaagttgttacagttcccctggagagcggagtataacaacttcacttagccaggggaaggtttccctgggcaaaaagtgttacagccctgctccactctgctctgggttctctctgctccggcaaaaagtctcacccaaacttcattcaagatatattgggagggaagaatccaggagagtggttacaagggagggaacagccacaagctgaacagataaggggtttatatagggattgggggtgggggggagagggggaggggttccagggtggggattggtcagatttcaatccctgagtttaggcatagctagatcttctgctcagagattggctagttttctgcacaggtttaaggtcagatttggctctggtttcagggctgaagtgtgtttcttttactggtcctttttagccttttggctctagttttagtggcagggtgtatttctttaactggctctgattccagggacaaagtgtgtttctttggctctgctcaggtgtgtttctttggctggtccccttttccctacaacagcacctcaccatctcctccttaattcttttcataaagctgaagctatatcacttagaatatctccacatttccctgtcctttaacttgcattgtaattttgtttgttttgaggcagggtcttggtatacaacccaggctggccttgaactctgaaaaatgcatctgtttcttctgtcttgagagtgcaggactcaaaggtgtcaccattgattatattttattattattaattattattattaattattattattattattactactattattttggagacaggatctcactgggaaacccacactccttgaactcatgacaatcctctcgtctccacttcccaagcaccaggattattatagccataaacaccaagcccagcttaagattctgtcaagttaacccacccccctttttggcttttaataactgctgccatttataaaagggcctctgcaggagtcaaggggcaaggaactgtgaacatccttagagttaaaagcagtgtccctccaacagccagcgagtagctaggcccttggtctaacagcagcaggaactgggggctaccagagtctgagtctggaagcagagcccttcctaggccttgacagctggctgtcgctgacagcagaatatcagccctgtgatggtcaggtctttcccatggttagatctccaactcagtgactgtgaggttgtaaatgcagctttaaaacattacatttgtagaaatgtatttcatagcatagaaaacacacacacacacactatcttgtcctgtaagcttccaacctaagcaaagtagcttcagtactccatcgtttcttcttgtccctccccccccccagacagggtttctctgggtagctttggagtctatcctggcacttgctctggagaccaggctggcctcaaactcacagagatttgcctgcctctgcctcccgagtgctgggattagaggtgtgagccaccaacgcccgctaagtgacaacctttatgcttctgcagtgtttataacattaatgcattgcttttcttatttacaaaggtatgatggctcatcttgtcaacttgttggattgaaaaatgcctaggcaattagtagagcacacataggctgtgctggtgagggtgtccccagagacagaccctgaagactacaacctgatgaatggattaattcctcagtgggttcatcataaaataatattaagaagtggtaaaatgccatgacctgcacagcttagagattgacctaactggagagacagggaaagaagaaacatacacatagaaaagctgggatctggtgggctgtgtgctctgatggagatgcaccagcagcccagaaagtcagtgcctgtgtttggtatatctgaacaaggaggcaggtttattgtttacaactgaaggaggagatgggctaatattctccgtaggaattctctataggggagcagcctcaggctgtaagcatcccctgaagaggaagctgtggtttatagtttctgcgtacactggttttagttaaaggtcaattgtttgtaacatttatacttggaccagagagaggctttgccattcccatgggtctgaggcattgtggtccttgacatggcgatgttcctgtcaacatacattcaagactttatctacttcacacacactcaggaaggacttcctcccggcccaacattgaaggcaagaggtaggcttagctggaggaagtgggtcactggggatgtgtccctgggactgtttctttctcggggctccttctttcctgttagctcttttctctacttcctgggtgtcagaatggatgtaaactgactttgtctacaatgccttctccaccacgatggtctgagccctccgaaactgtgagctaaagcaattccctttagttgtcaggtattttgttctatcaaagagaaaagtaactaatacaaaagacataaatacttgcttagcatgagcaaggcctaggttccatacccagcactataaaaatgaatgaatgaatgaatgcctaaaaagctaaagctgacccctgaatctctcttctatttcctatcttatcatgtgacctgtgtctgctagcggctcctgacaaggaaaccatccaccatgatcctcaccagagctaagcagatgtgttgtataacctaggacctctaaaactgtgctaaaaaaaaaaaaaaaggaaagaaaagaaaacaacctttatttttatcgggggtggggatatttcaagacagggtttctctgtgtagccctggctgctctggcacttgctctatagaccaggctggccttgaactcagagatccattcacctgcctctgcctcctgagtgctgggatcaaaggcattggtaccaccatccagcaagcctcttttctttacaaatacccagcctcaattatttgataatggcaattgaaactaagacatatagctatcatccaaaataatcagaagggagccagatggaaagccagtgtgaggcaacacccagatctgggggactgaagcaggcagggcctgactcctggagatgtctgtgtgtgagagaaattagcagaagtctcacctgattccctcctcgttctcagtgaacggggaagtggtgatctgtgctgggctctagaattaagacatttcgatcattcttccagaaagatagcatgtccttttctgaaggataaagtttctctgctctcttgtgcaggctgctatgcattgctgggttttattatcataaaaataatgagaggttcaagatgccaagtctggagccagcctgactagtctgaatccttattatcattctcctgtgaccttggacaagtaactttgtctctgtgcctcagtattctcacctgcaaagtgggagtgataatcataggatctatttcatagctctagaaagattaaaggagcagacaggagaactccttgctctcttgcagtgtgtctcatctttactattgctttgcccttttaaagtgatatttttacatttatttatttaagggggtacgagggtgggcacacactcaccacacaaaatttcaggaatcgattctccccttccatcatgtgagcctcagggatggaactgaggccgtcagatttggcagcaaatgcctttctgggccctgctttacaggtttccttgccacctgacagagaggctgctgaggagagagaggcagaaggcagtaatcgaagcaagtgcaagcgcaaagccaggtaggaaacaagggggatgtcggcacagttggcgcttgcttggagaaagcggaaagagctcctttcagatactccgtgtttatgtcaggaattacaggggggtaagaacaaagccaggaacctacttcagtagagaaggtgagtgggtaggtaccgggcgagggcagtctttcttgctccttccttgggtgccccagaagccagcccagataaaggagagacactagcagggggtgtttggggtacacagctggccatttcgggttattaaattcaaagagcaggaagcagagtcaactgatgaagccccgagggaccgggtgggacaggaagaaaggttcttttcggctttctgagttgtttcaaggtcctgcagcttcacctctctgctcatctctaatgactcggtgacttctgctggggtttcttgctttctttacttctgtggtactaaagacagaacccaggaccttgttcgtgttcagttagggctctctgccactgagctacatcttactgctgcagacatagttcagttagtaagagagcttgcctctgtcactcacatcaacaaccaaagctgacagtgtcttgagagaattcacattagcgtcaatccccctttttcatcggataatatacaggaaaacagatgttgaattgaaactgacaaattaagaatgggtgatgtttaaattgctgaggttctttttcttctgtggtggtggttgtctttcccattacccaggctagcctggaacatagtatgtatctcaggctactcttgggctggtgacaatcctccctcttcacacccccaccactccagaatgctagaattacagacctgtgccatcacaaacaacttcagttggctgtgttttgttttctcaagaagcaaagctttggggactggagagatggctcagaggttaagagcaccgactgctcttccagaggtcctgagttcaattcccagcaaccacatggtggctcacaaccatccgttatgagatctggtgccctcttctggtgtgcagatatacatggaagcagaatgttgtatacataataaataaaatctaaaaaaaaaagcagcagcagcaaagctttgggtggtggtgacaaacacctttaatcccagcacaccggaggcagaggcaggcagatctctgtgagttcaagaccagcctggtctacaaaagctagttccaggacaggctccaaagccacagagaaaccctgccttgaaccccccccaaaaaacccaaaataataaataaggcagagagcagttgaggaagacactggatgttgacctctgtcctctatgtacacctatacatacatacacgcacatacccgaatatatggatatttttttattctggattttagccctagttagccggtgtagaccaggctgacctccaactcatggaaatctgcctgcctctgtctcctgagtactgagattaaaggtgtgcaccaccatacgcagcctgtgaagttctttactatatttatactagaaaaactgaccaattaaaaaaattggctagcatataaagtaatgagtctcatttatacacacacacactatatatatatatatgtatatgtatgtttatttttaattcgaccccactgcctgccctgtccctatttcttctcttactgccccccttcttcccctgaaatagttcccccttctgctttcatgacataaacaccctattaccctctctagtccccccatttagacctcttcctctcttcttatagttcccttttttctcttatctcttatatatacatagtatctatagatttcctttactcttcatataagcagcctaagatgatctgtgaaaatggttctgtactctcctgacccagaaaaccctatacaacaatgcaaatcaagaaatcaaattatgccagggaggtaaaggcaggaggatctttaaattcaaggctaacctgatatacagttccaggacagccagggttcaaatctttgtattcacctaagaatattagagaaatttgggcagtggtggtgcacaactttaatcccagcactcaggaggcagaggcaggcatatctctgtgaacttgaggccagcctgatctaaagagtgagttccaggacagccagggctacacagagaaaccctgtctcgaaaaaccaaaagggaaaaatagagagagaatatcagagaaactgctggatatctgggaagccaccaaatacctgaaagatgtcacttggaagacacaatgtgtatcattctggcagtgtagggtggagtttctaagcatgcccaagacacacagtggggctgggtacaaggttggtgatcccaaaagagagctcactttttcccacctgcttgagaatgcagagaataacacacagcttgcatgtgggggtcaaaggaccacctctgcagttggttctctcttgagggtaaaactcaggtccctgtgctaggcagcaagtgcctttacccattgaagcatctcaccagccttcaaaacagttttaatttgcatttctctcactactaaagaagctgaacttttggattttgtttgtttttcaagacagggttaccctgtgaagctttggatcctgtcctggaattctctgtgtagaccaggctggccttgaactcacagagatccaactgtctctgcctcctgagtgctgggatcaaaggtgtgcgccaccattgcctgacaaagctgaacatttttttcaaatatttacaaattcttattaggtaaaaaaaaaaaaaatgaatgtggtcaggcgttggtggcacactcctttaatcccagcacttgggaagcagaggcaggtggatctctgtgagttacaggccagcctggtctacagatcgagttccaggacagcctccaaagctacaaagaaaccctgtctcggggaaaaaaattgaatgtggtcatttttaagatttaaagcatgtatttctaaacactttgatcaaagctggtaaaaagccagttgtggtggcacatgcctataatatactagcattttggagcctaaggcaggaagatcttgagttctaaaccagcctgggcaacatagcaagactctgtcagaaaacacgggagggggaaaggaaggattcttaacactatgtatagattatgtgagccaacatatgtgttttcaggtattctatgtgcatgattaacaagggcacctgtgtgtgggggtgagtgtagaggccagaggtcaaagccaacagtattccacaattgctctccacgttaatcttttgaaacagagtctctcactgagcctggagctcaccatttaaattagactagctggtcagtgagttccagggatctgcctctctttcctcccagtttacagacatgcttcggctgtgcctggcttttatgtgggtgcctggggtccgaattcaggtcctcatgctttgctagaaagcactttaatccactaagtcagtccccagtccctgtttcaggtttttgttttggtttttttgagataagttttaactcaggccaacctttaactatttggtcatcctgagtagctgggataacaaatccaagccaccaggcctgccttgttctctatcttttttggtggtggataacttgagacagggtttcatgtagtccaggctggcctctacctcctaagtgctcaagttacaggcttgtgccactgagtagggctgcctgccttcaaactcctgatcatcttgcctcaggctcctgagtactgggattacaaacttgaaccaccacatctagcatatttctcttttagattttcttttcttagtctattgtagtgcgtgtgtgtacaccactgtgtgcaggtgtcttgcagaggtagaagaaggaattgcatccccaagagctggaatcacaaatagttgtgaactacctgatgtaggtgccaggaactgaactcaggacctctggagaagcagcaaaagctcttaaccactgagccatctctccaaccctcatgttctgttttgatactggaaaaatgaggacacaatttcttggaccattaaagaaaacaatgccaggtgcttttgaggtcctaggtaacccaagttcttgtttctgcggctgctgatctctggtttcattctcaagtcgaccaaagaaactcaattcccccttccccacaagaaaagtcagcactacggaactgcttcattttgctcttccccgcttcctgacttctgtctctatttctcagcagtgctgggacagattccaggactcctgcattctatgtaagtgttttcccactgagttacacccctgcttttcttgaacttggacaattagtctgattcttggataagaaggaatacttgagccaggtggcggtagcacgcctttaatcccaacactcaggagacagaggcaggaggatctcattgagtttgagaccagcctgctctacagagcaagttccaggatagccagggctactcagagaaaccctgtcttaaaaaaagaagaagaagaagaagaagaagaagaagaagaagaagaagaagaagaagaagaagaagaagaagaagaagaagaagaagaagaagaagaagaagaagacaacaaaaccatccttagctatgtaaggagtttcaggccagctgaggctacatgagatcctgtctcaaaaatagtttaactgtatttacaatacacttaaaaaatgttttgctgagaaccaaactcagggtcttagcattaaatcccatcccaccccaaagtcccatttattgaggaaagaaagggaaggcaacgctgaggatgtagctcagttggtagataagtgccgctagcacaaagcaacagagcactgggtttgatccctggcaccatgtaaaaccatctaagctggcccatttcccagcacttgggaggaggagacaggaggttcatggaagctgcctggcggcatgagaccctgtctcaaacagaaagttcactacctaggcaggctctgcacttctgggattgagcactcatacagatgactattttctggaccagactaaaggagagagttttggagaaagtgagggtctgaggctacaggacagatggtccatgttttccaaccaagtgtgagcacagggagaatctataggttatcatatccaaaaggttcattggagctgggtgtgggggcacatgccagacagactgaggcagaggatcatgagttcaagaccagactgagccacatagggagaacatgaccaaacattaacagtgcagatggggctggagagatggctcagaggttaagagcactggctgctcttccagaggtcctgagttcaattcccagcaaccacatggtggctcacaaccatccgttatgagataatggtgccctcttctggtgtgcagatagacatggaagcagaatgttgtattcataataaataaatgaatctttaaaaaaaaaaaaaaccagtgcagatggaacacaaggtttgccatgagtcaataaaatggtacaaggcagccaggcggtggtagtacatgcctttaatacctcaggaggcagaggcaggcggatctctgggagttcgaggccagcctggtctacaaatcaagttccggtataggctccaaagctacacagagaaaccctgtctcgaaaaaccataagtaaataaataaatggatacacaggagttaattacacaatttcatctacttctgtgtatgacaacttccatgggagtgggtgagatttccagccagcaaaaagggggctccaaaccatcgtgttaagtgtgtatgtggtggggtaatgcttcagtaaaagaaacaggcaaaatgatttctgttctagagtttatattctttcttccaaaaaacagacaataagcaaacaaacaaatggcagacttaaatcaacaacaaagacaaggtggtaagtgtccaacagtcttctctgtgcctggtgaacagcagacaaaggagagtgaacagtgattcacactctttgattggcattttccagagtctccttatggagtcttggctaagttggaactccctatgtagaccaggctagccttcaactcccagccatccttctgcatctgattctagattgctgggattacaagtatgcaccatcacacttagttttggcaatttcatctatcatttcatttatacgcaaatattaactaatggccacaattattatgttctacgggtaatattttaacttaaagcttttactcccctccttcctgttattataaactccaaatgttgaagccataactgatctctgcaagtggattctgttagctgggtgtggtgacatgtagctttaatcccaacattcaggaggcagacagatagatctctgtgagccagcctgctggtctacatgtcagttccagactaagccaagggctacaggaaaccctctaaaagaacaaaagaccagtgccctttaagaatccttcagtagatggggctggagagatggctcagtggttaagagcactggctgctttttcagagggcccggggttcaattcccagcacccacatggcagctcacaactgtctgttacttcagtttcaggggatctgacaccttcacaccaatacacataaaataaagttaaataaattgttaaaaagtaaaaattaaaaaaataaagaatccttcagcagaaaagggctttttttccttcagtagcagctccctgccctccattaactggaaatgaaatctccatttcccttagctacagtctttgccactcttggggatccaaggcatcctatcccctggccaagtgcagcttccctgtgcaaggcaacgcttccagagagagattcaaccagggcatgactcttactggttctgttcacttcagcattcctagccctccaaaactatactcaccagagctgggatgctggacatacatgccaaatttgggaaacttcctgaagttactaaggacaaccagtcatgttcccagaaagagtctatggtccatcttcacataaataaatactactacttccgagttacagatgggactttagagaacccaccatctacatgaagtagttcacctgacagtccttcaatcccttagaaatatttgtttagcctggcagtagtgtcgcacgcctttaatcccagcacttgggaggcagaggcaggcagatctcttcgagttcaaggccagcctggtctacagagtgagttccagtacacaaaaatacacagagaaaccctgtctcgaaaaaaagaaatatttacttaaagtcgggaataaagcatgggaaaacctagcaagcatacaaagagagtactatctgtagagtactatctgtgactcggtaacatttcttggagtactatctgtagagtactatctgtgactcggtaacatttcttgaagactgattgattcaagtgatatgtaacagccttcttggataaatccagccgcaaatattttagttccctgaaaacaaaaaacaagcaaaagaaaaaaaaaagtgcttcttggctcaaattatagggatttctttctttactggcagctcagtgtaggctttttctgcatgtgtttttaggatagtatcgcagattgcacgtgtttttatcacatcaacacttaacactctttaaataataacgaaacgggaggcctggattctgtctgtttctccggggcttgttcctcacttaagtgaccttgggcaagtatcattccttctctcctatctggtttctacatatctgttccagcatctccttcacaaccctatgggatctctcttgtaccgaaagccctcacccagggctgtgaagcctggtccctaccgtctgggggtcagctaatgacaacctgagctgcgccgtgctgctcaagctaccgagcggtgctggaaagcgggaaacacggcaagccctgcggcagctcttccttagtacctgccgttttcagcctcttacagcgacagccttaagctgctatgtcacagtctccttccacagcgatcttccgaggagggtgaggccgctcgctgagcggcccactcgggctggaccggcagccgggccgtgcgcagcgacagctgtgctgcacattgttcccgaggctcacaacacacagccatcttgcatcaagaacggcggcccaggcaggagcgggtgagcgcggtgtcgccgccgccgccgtcggggaagcagcgctggcagtggccgccccgcctctcccgggtagagtccgcgacgggcttgtcctcaggcgatttggcccggccctcggacgcgcccgcgccccgcgcccgcgctaggcgggaagcgaaccgcggggccccgcccctgccgcgcgcaacgggcgcggcccgagagtgggcgcgggcctcgggcttccactcgccggcttccggctcgggcgcctcgtccaccgggcgcggcgaccgcggggccgcggccttctccccgccccacgcgggcgggcgcctcggggacgcgcgcgggggcggcgcccctccccccgcaggccgggcgctggcccgcggcccgccctcccatcccccacgggccccctcggtacccccccttatccctcacccccccacccccgggagccggggctccgggggctccccgtggcgctggccccgggcggggagggaagcgagcgcgggccgggccgggggcgggcggcgtctcggcgggccccgcggcccctcggcgtgtcttttgtgtttgtacacaccgcgagaggcggcgggagccgggggcgggcggcgcgcggggtgggggggcgggggtggaggaggagcgagcgcgcgcgccagcgaacgggcgcgcggggggaggggcggggggcgggcgcgcgggccccggggcggggccgagccttccctccattgtgtgtgattggctggcgcggcgcggggcggggcggcgtgtgtgggggtagcctcggtgtcagccatctttcaattgtgttcgcagccgtcgccgccgccgccgccgctctctaacgccagcgccgcctctcgcttgccgagctccagccgaaggagaaggggggtaagtttctccgtccgcccgctctcccggagccgggccccgtccgccggcgctgccgtagcgggccgcggagggcccccgcagcccctcgggctcgaccctcaaactttttggcgcagacacggagacggggagcgagtttccctctcctcgggcggcggcggcggcggcggcggcggcagctctccgtctccgcctcagcccggcggcggccccgccgcgccgcctgccgagcctgctggccctcccgcgccgcgggctctcctttcttcggtgaaatcccgcccgccgccccttcccgggaccccagaccttcaccaggtcccgcgcgagcccctcaactgccgcctgcgggtcccgggccgcagtttgtcgggcgcgaaatgggtaaaatcgccgtcgcttcccgccccgggcgaactcgctttttgctgcctccccacagttgtggctgagcttcaccatcttgtctctcttctctggtcaccgaccatgtttcttttcccccccgtttctctcttccccattttaaaatggaaggaggaaaaaaatcttaagcacctttttttttatttttttgccttttttggaggaaaaaaaaggaaacttgatgcatatgaaattcgaaataacgaaaaaaagaacttttgcatttgggggagagcggcacgtggcaggggatggggtatttttcgaagggtttgctgtttgtgtctttggaagggagtcggatacattttgcaattgtttccattttgtgctagccttggggagccgagtcgttcgctgccggcacggggcgcccgggccgggccgggcagggcaggtcggggacccgggacccggggacccgggggaggcagaagcaaaagtttatgtggtgctggggtgggccgggcggccggtgtcgagcgctaattaagactgggtgcggggcagtcggctggcatagcgaagcccgggaggacgggctttgtggaatgctcgctggcaatagctgttgttcttgtctttcgagacgcctttttgtcaacataaccgtaaagatagaaacctcaagaatgtttacagatatttacagcaatccaactgccgagcgcgaggcggggggcgcgaacgggggggggacgctggaaccttttttctttttttctttcttttttttttttttggctgtaatttgactcgacctttctgtggtttgtggcttctttcgtttgacttgtttgtgatcgaatgcttgcaggcatttctaatttctactttaattaaagaaattgaattaaaacccattggggtggtctcgctggttttggccgtttgtcgcttggaattggcgttatgagtattaatgctgacaattttccggtttgttttaagtcgtatttgggtagtagacctaacctgcgccctttcaaattaattatataacagccttttttttttctcagtaatgataggtttctgggattttttttttttttagggggtggcttctggcaagaaaatgtatgttttagttgaatatgatttttttttttttaatactggtaggtaagtaaggaggtgctcttaccatggctcgtacaaagcagactgcccgcaaatccaccggtggtaaagcacccaggaaacaactggctacaaaagccgctcgcaagagtgcgccctctactggaggggtgaaaaaacctcatcgttacaggtatttataaaagggggaggaataggacagtgtctaaacagtatgtccatgtaatttaacaggaaggtgagggaaagatgttttccttctgaatgtttactgctgcttgaaaatacacgtgcatatgttcatttatgaatacatgtaacttagtgtcaggctttattgataacattttgaagttgtaatctgatctaaattctaaagggacgcggttctcaactggtagtaggacacattaacattttaaccattagcattttaagtatgaaatggtttcatatgtgtatacaggcacataaaaatggttgtgtttttacacatactttttgttttggttgacccacacttgtggtaaagtgtagtaccttagggagactagtaaagaaagtctcttggtcataattacttgggtttttccctcctttactccctcattttatttttatgtaagcactgttgttaaggacatctgccattagagggcataagttgcccaaatttgcatagacagattgtacagtgaacagctcatagagttgaaataagtcaaatttaggggttaaaggatttgttttctctcttatctttcccactctcttcccccaataaagcttcccaagttaaaaaaaaaaagtattatagacaatgacttaattttagaaaatttttcatgtgggagaaacaatgtgaaatcaagttttcaaattcagtcattcatgactggtgatacaatactgggagatcaaatacgagtgttttaagtgaatcgttgtaaattatgttggtaactcttttaggactttaaaacctaaggcacagatggggcaacagaaagtgttgcttaaactgggaagatgtctttattgccagcctaacttcgaatatgctcccaagtcttgtttgtttgtttgtttttaaggcggggctcactctaacctatccttgcctggaattcattatgtagatcaggctggtatcaagcctcctgcctctgcctcctgagtcctggtgcaagtattcaataccacactcaggtgtggttctcaggtcaagattcgggggtgggtgaacagataaaatgaatatggtgctttcataaactgccactttgtgtttgttttgttttgttttttgtgatctcgaagggcggtggtggcgcacgcctttaatcccagcacttgggaggcagaggcaggtggatctctgagttcgagaccagcctggtcgacaagagctagttccaggacagtctccaaagctacacagggaaaccctgtcttgaaaaaccaaaaaaaaaaagtgatctcaacagatttgaatattcaggtcataaaactgatctgtgaaatggggcgctcaagaatggtttagagttcatgtatttctttaaaactgactactgttgtgttgtgtgtgtttagtaacaactttttaatgttaacttttgaaggcctggtactgtggcactccgtgaaatcagacgctatcagaaatccactgaacttctgattcgcaagctccccttccagcgtctggttcgagaaattgctcaggacttcaaaacagatctgcgcttccagagtgcagctattggtgctttgcaggtaaatagatgggtgggaagaccctgtttttgttgatgatttgcacgtctttcttgttttaagtctgtgaggtagtgattcgctcttgatgaaatttaaaggtaagccgagtagtggtggtctttaattacagcccttgggaggcagagccagagttccaggacagccaggattacacatagaaagcccgttttgagaaacctaaaaatgattcaaggttatgcacataaaaattaaaatcctaatttgattctaaagcctaatacagttgttatgctttgtttgtttacttgtttatttaggttttttggagcaggatttctctgtgtaacagtcccagctgtcctggaactcactttgtagagtaggctggcctcgaacttactgagatctgcttgcttcttcctcccaagtgctaggattaaaggcatgcaccaccactgcctgacataattatttttctaacattgcattaaaaacaggctgggcattggtggcgcacgcctttaatcccaacactcaggaggcagaggcaggcggatctctgtgagttggaggccagcctggtctccagagtgagtgccaggataggctccaaagctacacagagaaaccctgtcttgaaaccaccaccaccaccaccacccccaaaaacaaaacaaaaaaaaacagtgcttaactctgggttgttttgtgggtgctacaggtcattaggatatagaactagaattctatttgtagccactttctattagtagtgatgaagaaatgtctttctggatgtaaagaagcaaattaggatatagtttaatgtctaaatagaataggcaatattcaagagttacatgttataagtgggtgtgtaaaggaaaatggacttgaacacttgtggtttgaaaggaaactgtatagttcaaattaaatagaaagcataatgtgaatttaatcttaggtctaatgttgggaacagtgttctggagacagttgtataaagtacttgacaaatacatagatataattaacctgtagcagaatgtggtaaaactcacagcatagtcaaaaagcacagggtgggttaaatgtgtgttgctgggcactgctgcacatcaacattggaggagttcagggttgctgttgctgtcctagcttttgctttatggatgagaaagatttgataggtggattccactcaggcatataattggtcgggctgtttctatggttaggctaagcttcattttattggtgaattccaggaataggcatccattaaattcggggattgaaatgactgaaatttcagttaccaaaatcttcccatgttgttccttagctgcttataaattcctgtgagcaaatcacaattactaagaaccccaaaaagagatagcatattttggtgggagaattcttttggggttttaagtcattcatgtgtgaatgtaccttaccactattaattggttacagttaacagtgactgattttttttttttttagtaaaatgcgtactttttgagtgtttttttttttaatttaggtttattccaaaatattagccagctgtgtagttgagggtgaccttgaactcctgactctccagcatccacctgaagatggattataggcatgcactgccatgcctgttttatgtggtacttagggttaactccagagccttgtgcatactaggcaactccccgccctgaacacacacacacttttctctgagtagccctggctgtcgtagatcaggctgaccttgaactgaggtctatctgccattgcctcctgaggctggcataaaagtggccctaggtttagtttagtccctagtacacaacacaaaaaagatagtcatttgcatttgctagtagaagtgggatatagaagcaggcagatgaggtaagatttcaaacaacactttaatatgtcatgactcacaacatttataattcacaagagagcctgaggcaagggtgttgtagcctgggctacacagtgagacctagtctcttaaaaacaagttactctatttttggctttagaattacacaatttaagttgggcgtgatggggcttgctggtctgtaatgccaacactcgagaatagtggcaggaaggttatgaatcaacatcagcatgggctgatagctagttcaagactagcctgggatgacacattgtttgtgatcctgacttaaaaagaagacaactgggcatggtggcacaggcctttaatcctagaacttggaggctaaggccggcacgtcttgagtttgagatcagcctggtctacaaagcgcgttccaggataggctccaaacctacacagagaaaccctgtcttaaaagagtttaggcactgagatagatgcctctggttaaaagcactgctgcttgtcctttatttcccatctgtcaggcagctcacagccacctgtaacaacaggtcaagggatctaccctctgggccttgcacactggcattattgcatggatatgatgcacatgcatgcacagataatacattaatctttttaattacataactaactcaaagatagcttctctgtccctccaacattccaaaaatccccaaaagatccccaaaactggatgatttcaaatcctatgtataacctgggtggtcaggtggttttatgtgcattaagtagtaatttataacttagacacaatatcagactgcaacagtaaaggaggtggtacagttagaacaatgcacttttgtagtcctaaatagagtttaaacctagcgtctcctgcttccttgggtaagcactctatctacactgaactattccccagcattattttaatgtgggtggttttttttttttttttttgagacggtctttctatgtagtctggttgttcttgaagtcacagatctgcctgcctctgactccacagcgcagggatgaaaggtatgcattaccatgcctggccaacttgtcttgaacgtgcagttttcttgcctctaccttcctgaggtgctagcttgcattgctggcagagtatactgttaataaaaagtttaaattttatgaaatgtgtgtcaggtatgatggctcacacctgtatccctaagactggaggctgtggtgggaaaatgatttaaggctagcatgggctaaattgaaacctagcctcaataaaaataaagtgtttacttctagcttttccatttaatgtgttcagatcatggttggcagtaatgagagttgtagagatgacgaaacaactgaaggaaaaggagtatgaatgtagctccaagaggtagagagattgcggataattgggaactgaccaatgtaataatgcttagcttttaccccaagtcagagagcttgaactaaaatgtttttatattaagaatggacagtattgaagcagagtcagactataaatatgctaggtgtggcagttcacagtctttaatcccagcactctcaggaggcagaggcaggctgatctgactgcaaggccagcctagacttcagagggaatttgcggaagagccagggctacacagagaaaccctgtctcgaaaagcagcaatgttataaataaattaatatctattcataagttgctttttcttaccatttcaaaattgtattccttgtgttaaaaattaatgtgacaagtgtttattttgatacagggtcttactatttagaccttggcttagaagtcagattccctgctgggattgaaggcattttataccctgctggaccccctttataattttagtgctataaagggatttaggagcatttggtaaaagatttgggaatatatgtgtgttcagtaatcttccagaacacaacccctagaagcaaacagtctcagatacatgaccccagtggtactcccagaacagatttttgttaatatctttgaggcagggtcttgctaagttgtccaagctagccttgaacacatggatctcctgtttcaccctccagagtaggtagagtcctactgtaggcagagctggagaagatttaatgagggttaggtataaaaagcaaactaacaagcactgaacatgtacatgagaaccaagcgttacatggaatgagatatctcttagcaagttaactgaagggtattaaaagctgactgggccgggcattggtggcgcatgcctttaatcccagcactcgggaggcagaggcaggcgggtgtctgtgagttcgagacgagtctggtctacaagagctagttccaggacagcctccaaagacacagagaaacccgtctcagaaaaccaagaaaataaaaaaataaagctgactggtgtgaatgcacaggaactgaggtataacttaattaccaagaacgtgttccttcaaggaatcctttttgagccagaacttggatattaagactcctaagtgttaaagacataggaatagtaaattttgcatgaagctagatttttatagaagtatgatactaaggattccttatggatgaagatggggctgtagagttagcttccttaagtgcttgtcttgcaaacatggaggcctgaattcaatccctaacacccatgtaaaaagctgtgtggtaggtgcttgtaaatacactgagaacaggggctcaatggttaacctgcatagcctggctcactagttccaagtttctgtgctggactctgtctcaaaaaacaaggtgagactgggaagatggttcagtcattaaagtgcttatcataccagcatgaggacctgggttgaaatccccagtacacacagaaaggggcacagtgtctttcatctcagtgccagagaattggagataggcagatccttggagcttgctggcttaccaacctagctaaattgaaggggctccagttttgataaggagctctgtcccagtaaataatgtgataagaactgacaaaggaacccaatttcatctcctctcatgcacacacacaggtggctcctgaggttgctctctggcttctgtgtgtacacacaatgccttcccactcaaatccatacatacacaaaggacgaagttaccaatgtgaacgaagggcagcaccagtggtagagtgcttgcttagcatgcacaaagtaatttataaaaactttccagatgtgtatattttatgttgaaccatattcctcttcacttcctttgttagtatatatataaagcagaatcttagttttgttgtgtgacgtattggtgaaaggggatgccactaggctacattgtactccaattcctatcctgggaatcgtaggaacatcttttaaaatgaagctatttatttgtgtgtgtatgtatacattccactcagaacaacctgcagaagttggctagccgccttccatcctgtggatcccagggaacaaataatgccagcatttgagttgtaggcaggggtcccaaactttgggttctctcatgtctcgttacaattgtcaattaatggttcatgcagctagcaagtttggggtggtaatgccctggggagctgggcagtgttggtgcccggctttaatcccaggactcaggaagcagaggcaggtggatctcttgagttccaggccagcctcatctacaaagtgaattctgctcaggacaggctcgagagcccagtctcaaaaaaatgccctgggaaatcttacagtgaaaggagaggggaaacaggatcagcattctagagggcaggaaacaccattatgcattgaggatttggaagaaagtactttgaagctggttacacagataagtcaaccaatcgatgatgtattctggaacccttccttaagtactcctgtagaactgaaaggagaacaagaacaaggttcaaagtataagaatgtggacaggctcagaggtgagggggacctgttcttattgctgctgccgtggttggtgtcagcctttggagaggtgttgggctgcatacaattccctctgtaagggtgggaatgttagaattggtttctttgaagtgtcttggtgctttgtatgattttataaaaatttatgaacttatgctggatggtggtggtgaatgcattttaatcctggcattccaggggagatatcctggtctacaaagcaagtttcaggacatccagggctacacagagaaatcttgtccaaaagggaggtggggtatgagcctaagcattttgatagtttttggtgtgtgtgggtgtgtgtgtacaccgtgtgatgtgaacatttgataaattaagttgtgataaaaaagtaagtttgtaaagggttttactattatataagtgttggaaacaatagtaatttttctttattttgcaggaggcaagtgaggcctatctggttggcctttttgaagataccaacctgtgtgctatccacgccaaacgtgtaacaattatgccaaaagatatccagctagcacgccgcatacgcggagaacgtgcttaaaagtccactatgaggggaaacatttcattctcaaaaatttttttcctcttcctgttatcagtagttctgaatgttagatattttttccatggggtcaaaaggtacctaagtatatgattgcgagtggaaaaataggggacagaaatcaggtattggcagtttttccattttcatttgtgtgtgaatttttaatataaatgcaagatgtaaagcattaatgcaagcaaaatgtttcagtgaacacatttcaacagttcaactttataacaattataaataaacctgttaaaattttctggacaatgccagcatttggatttttttaaaataagtaaatttcttattgacggcaactaaatggtgtttgtagcatttttatcatacagtagattccatccattcactatacttttctaactgagttgtcctacatgcaagtacatgtttttaatgttgtctgtcttctgtgctgttcctgtaagtttgctattaaaatacattaaactatacctgcttttggtctttattattaatctcacagataaaaatttaatatccagtgattatcagcttttgtgtgagacaaaactcttgagaagcaaggcagtggtgtcacatacttttaatcccagcattcaggaggtagaggcagttggatctctgagtttgaggccaacctggtgtacagattgaggtccaggatagccaaggctacacagagaaaccctgtctccaaaaagcctcttgagagacatagaaaaacaaagtcatcagctggagtgtctggagaaacccagagtacaatcataggcacatactatcaaatatctaatatggtttctcactgcaacagtcctagctgtactggaactttgtagaccaggctggcctcaaactcacagggatctccttccccagtgcttcaccactgcccactggtcttgcttttttttttttttttttttttttaagttattcaagcaccaaacattcattaacccgttttaattagcattgcaatgtttaaggtaaaatgtgtggtgatgggcactaataacactgaaggaaatgaaatactaatctttgggccgaaaacagactatagtcaacaagggcagtatctggtgggttttttttttgtttttgcagaaactagattataggtgtttatgaaaattggctggaaccaggtggtagtaccgactgggtgtggtggctcatccttgtaatcccaacactcaggcactcaagatacagagataggcctagaagtttggagttactcttagccacatccctgaactatgcttagttcaagaccagcctgggttacatgagttgtttctaagaaaatcttggacaagctgggcatggtttgtgccagcaatctggaggcaggcaagcagatttgagtctggtctacagagttccaagacagccagggttgcatagaaaaaccctgtctccagaaagtctcttggactaatcaatacagtttttaaactgttggtacattttgtcttttggtttttcaagacagggtttctccatgtaacagcccttgctgtcctgaaactgtaaaacagactgtcctaactcaagagatccacctgcctctgcctcctaaatgctgggattaaagaaaggcatgcaccaccaccacccagttttgttttaatacaggattttgttatatgtagcatcagctggctctcagacagcagtctttgattatgccacaggtaagacttgtttgttttgttcaagacagggtttctctggctttggaggctgtcctggaactagctcttgtagaccagactggtctcgaactcacagagatgcgcctgcctctgcctcatgagtgctgggactaaaggcgtgcgccactaggcctagctcaagaactgatttaaaaattgtcctacttcagtgtgcatgctgtggtgttgtctacccccgcccccatacaatttcaaaaataaaagtaccactcttggagcctttgttttgtttttgagatgtctatgtaggctggaactcctggttggtgtgttggtcaccacattcatcatgaaaaagggagctttaagaagtcaccagttgccaggaggtggtggtgcatgcctttaatcccagccctgggggggggggggtaggcgaatctctgagttcaaggctagtgtggtctacagagtgagttcaggacagctagggctagggctgttacacagagaaaccctgtcttgaaaaaccaaaaaataaaaagttacagttcctgagagtacagaaaagattgaaaaatctagagttgtcagggtaaatgtttacagggctggagagatggctcagcagcggagagcactggttctcttccggagaccctggtttcaattctcagcacccacacgtcagctcacagcaatctgactccagatctggggatccaaaactgccttctggtctcctcaggcaccaaggcacaaatgtggtacacagatacttgcaggcaaaacaagcacataagcttttttttttttttttttttttttttggtgtttggagacagggtttctctgtattgctttggagcctgtcctggaactcgttctgtagaccagtctgacctcaaagtcacagaaatcctcctgcctctgcctcctgagtgctgagattaaagatgtgcaccacgaacgcccgacctgcacatagcctttttaaaaagtgtttaatactgctacaaaaaacttctagaaaggaatttggaaacttaaacgttatgcaagtgttaaaatttcattgcactgttactatgagagaataaattcaaagtcccaagtaccctgaagacctgccagactctgaagtatgtccttttcagtgactgcatggagtagggtgcccgagaccacactgcaagtggagtctgggcttcattaccaacaacactactaaaacctaggaccatgtctgatagagcaaaccaaaactagagtgcctaactttgccagaagtagtaacactggaaaaagattggggtaggaagcctgagtgcaatcacactggtgctaaggagattcggtgactcagcagcttccgggcaagcatcaggactgaataccctatccccacaagccaagtaaatgcaggttttcatgaggagctacctgtgattacagtgttgggaaggcagaaacattcccaagaaaacgagtttgactaagctcagccactctgagcatcaacgtagaggtccccctctatgaataaggtaagcaataagagaacactcacaacctcagctggggccgccacatgaacacccatcgcccccgcagacagcagaaataagcatgctcaccgcctcttagtttattcccctacctcccacttttttagttttttgagacagggtttctctgtgtagccctagctgtcctggcactcgctctgtagatcaggctgacctcgaactcagagatctgcctgcctctgcctcctcgagtgctgggattaaatgtacctgtcccactttttccattaatttcattcagctttcactccccccaaagtgcatctgagcagggcagagtggtacacacctgtaattccagcactggaaaggcaaaagacagaagacaggcaggtctgcataaagagaccctgtctccaaaaaaaagaaaacaaaccacctaaaatacccaggagaatatctatatgggtgttttgcttgcaggcatggctatgcaacactttggtgacaggtgtccagacaagtcagaagagggcatcagatcccctagaactggaattaggcttcgtcgtgagcaatgtgggtgcagggactcgagacttcagtcctctctgccaggccaacaagtactcaaactgctgagctgtctctctagcctgtttttgtttttgtttttgagacagggtctctatgtagacctagatagcctggaatttgataagaagaccaggctggcctcaaacctgcctctgcttcccaagtgttggtgtgccttagcatgccctgaccttactgtttttcaattgtgtttaggactgatcattgaacccagggcctagacattctacactgtgctacacccttgccttccagtctttaagcttctataaccttaatatgtaatagatttaagagttaaatgaaaatatacaacaatacaagggctgatataaaatacccaataaacaccagtgttggtgcttgcctttagtaccagcacttaggaggcagagacaggcagatctctgtgagtttgaggccagcctgatttacaaagagagtcccaggataggctccataactaaaacaaaaactagaattctgaaaatccaagcacatagacattccttgcagagtttacaaagaaccaggctcagggttggagagatgactcagtgattaagagcactggctgctcttccagaggacccaggttccaattcccagcacccacatggcaactcacaactgttaactctagttccaggggatctgacaccctcacacaatacacggaggcaaacccaatgcacataaaaattttaaaaatccaggttctgggccaactgctagtttctagttaggtactctccagcagcccctgccccaccccacccccaccccccttcgcctccctcatctagtatttatggagctgctcctaggtaccaagaggtgctacagaactgacaaacaataacacccatagccatggggctgcattctagtgagagaaatgctaaagagaacacaaatggagataaagacatcagtaagatgtctttcaagtaaagtcctgaagaaaaagacagaagcaatgtggtgggagagaaaagtgtgtcgggtcccattggtcccagtcagtgcagacagcctgctgtgctccaggcaccatatgacggtgtgggtgtggctacagcagaagagcacagattgggagccagagtgtgccgggcattagaggacctgcatgaaccctggatggatggaagcctgcagggagttaagccaaaggagacgatgggatgacgttggatgaggttactcggctgctctgtcaatacaaacaggaaggaaccgtttagtaagctaactgtaccctgacagaggggcttggacttggtggtggcatcctggaaggttttgaaagagaggatgtcgaagacttggtggatatgggtgtgcctgagaaaaggcagtatggtttctctcagggattcaaggtcatggttgagactacctgaacttcatgtgacatctgcttcccatcaaatagggctgggagagagcacttgacaccaagcccgaagttgtattcctgggacccacgtgttgaaagcaacccataaaggagagtgataacttggtgttataaagggcctactaagcttgtttagtttttttttcccttgggtgggggcgggagggggagacgacaccattgagccagggttctctgtgtagctttggagcctgtcctagaacttgctaagcgtgtttaggaaacactgttacacaggtagaattcagcttaagctcagctcaaggatgagtagggaggggtatgctaaccagatgcgctagaaactgtaggaatgaaaaatgtgtgcttctcacataattaaagttgctgacaacatttaagatttgttcgctgctgagcacggtagctcagccttaatcccagcactcagggagacccagtctcaaacaaacaaagattctccacttaaatccccaccaatcagaccctattcccataacaaaagaagacatccctggctcacagctggccccagcccaatcccatatcaaagaggtacctacctctctccagggcaggtcagagagggcagctctgggtcacagcaccctgaagccctggtccactgctaagtccagactctgactgggaggagcctggctctccggggcaggcagtttgagttggttaatgccagcctacagaaagcagccccattctgacctgggccaacgaggacaatatttttacattataaatcttcccattttatttgtccaaacaaccaaaccttgacatttctgtagctgaaacatgttaattgctcaaaatgtcacttggggccatgaacctgtacaaactgccagggatcatgttcagggctggttcccctgcgccttggtcagagccagtcctggattgtcattcatttcctttgctggggaggcatgttcatcctataacaaaccgactcccaaaagttgtcctcggactccacgtgtctacaaaatgagtgactgaatgggtaaataaacataacttttgcctggcagtggtgctgcatgcctttgatcccagcactaaggaaacaaagacaggaggatctctgtgagttcgaggccaacctggcctacaaagtgagttccaggacaaccaaggctacacagagaaaccccgtcttaaaaagccaaataaatacattaattaataaaaatggaaaagaaaagaaaagccaggcgttggtggcgcacgcctttaatcccagcactcgggaggcagaggcaggcagatctctgtgagttcgaggccagcctggtctcccgagcaagtgccaggataggctccaaagctacacagagaaaccctgtctcggaaaaccaaaaaaaaaaaaaaaaggaaagaaagaaaagagaagccctcctgtgactgatccagctccctttgaggtcagcactacaattgcttccctcaaggcaaaacctcactgataagaaacctgcaacaaatccatcgcaggagacagaccacagggcttctaaaaatgtaaatctgtgttgtttgagtcacacacacatttgtttatttattatgttactattttagatgcaactattttagcttttgtattctaaataaattcttacacattaaacttgaaataattaatattaaaaaatcacagtggaggggctggagagatggctcagtggttaagagcactgactgttcttccagaggtcctgagttcaattcctggcaaggtggctcacaaccaccttgaatgagatttagtaccctctgctggtgtgcaggcagaagactgtatacataataaatacaaaaaataggccaggcattggtggcgcatgcctttaatctcagcactcaggaggcagaggcagacgggtttctgtgagttccaggatatccaggctacacagagaaaccctgtctcaaaaaaaaaagtatcttaaatttaaaaatgcaatttttctgaactcagatttccctgcctctgtcccccaagtgttgggatcacaaccctgtgccaccacactggccagtttaccaccgtaacaacagaaagctgatagggtatataatttgaagtgatatgaatgaacattttaaagatttatcaattagtaaaaacatgcacatcaaactcacaattttagttgacactaaattttgaatcaaagattgtttgaaacaggttcaaggcactgtaggccagattaacaggtaactcactgtgcaacccaggctgtccttgaacctttcctgcctggatccgcctgcctcccaaatattgggagaacatggggtttgtaccacctcactctgcttttaaaattatctattgttttgttttgtttttcgagacacctgcctctgcatcaaatgatattttggttttacagaaagtgctggcaagaataaggaaagtggcagggaaaggtctaggcttaaaaaaaaaaattactggagcccggcagtggtggcgcaggcctttagtcccagcacttgggaggcagaggcagaggcaggtgatctctgtgagttcgagatcagcctggtctacaagagctagttccaggacagcctccaaaagccgcagagaaaccctgtctcgaaaaaccaaacaaaaacaaaaactgggccaggtgttggtgcacacctttagtcccagcactctggagacagccatgtgaatctctgagttccaggacagcctggtctacagagcaagttccaggagaggctccaaagcaatacagagaaatccctgtccagaaaaacaataacaacaacgaaaaagttgagctggagagacggctcagcagttaacactggctgctcttccagtccccagcacccatatggcagctcacacctgctgtgactgtaactccagttccaggagatctgacagtcttacacagacatacatacagacaaaacaccaaaacacataagataaagtaaacaaaaatatgagaccgcataaaaagctgcttggtcatcttgtttgagcctgagtctgagcgaagagagtgagggaggggaggggcgctaaggtttaggtggtcactaggttgacatgaactctgcctgtcttcgaggtatgataggtttggctcaccttagcttccttggcccgaaggctgcgccaagacaaccacgctggttccaggctggccagcagatggccacgcgtcaggcttttcctgcgaatcccaagctccacgtggagtgtaggctggtcctgctgatgccctgaccccagccatgaccctggtcccgcatcgctccagttgtctcctccagcccttctcggggatgctccgaggtccctcgggtcccctgtatatcttggggacctgtgcaagccaagctggctctccgggtggacttggaccatcgggcaggaaaggagccagggccccattgtccagtctcttgtacccggagagtgtaggctgggcctgtaaaccacctagcgagaagcctctgggtaaagtgaaactcggctgccagcggcctccagccctctcatataagcctgctaattcgctagcttcaggttggctccatgggccgccggggcaaaaagctgtctagacaggcgatctaggaaactcttgggagacccagggtaaggatggggtccagaatttccacccctggtgaagctggctaggcttatactatgggcccaagagatgtcaacatctcaggatcaccaacaggatcagttttagtgagttgtcccaaagtcatcaattctgaggtcactgtgaggcctgaagaaattcctcggtagaggagggaatcctaaggctcaggaagctaggtctcagggacaccaaagataggtatggaaataactccacaaccggctgttgtctcctcaatcatgaggtagggctataacccctagggactgccctacttctactggatggagaagggaccccagaaggctgaagggagggcatcctacacacaaatgccacgtcaaggcagcattgccccgactcttctctaccctaggccctgaccctgtgtttgagcctggatccccctatgttgtctgccccctgagcctcagatccacgtgcgttgactaagatgcatggaaaactctatcacagtctcctcttcagtgtacccgttctgccctgaaagacagagcttcgatttctcaaagccatttcctcccaggaagcacccagctgcttttcccacctttcaattaggtcagctgctcctggacaatatggtataggattaaaccaggccaggccattcctactatgacttgttttttgtttgtttgtttgtctgttgtttttcaagacagggtttctctgtgtaacagttctagctgccctggcacgtgctctgtagaccaggctggccttgaactcacagagatccacctgcctctgcctcccaagcactgggattaaagaaaggtgtgagccaccactggccagccccactctaatttcagtgtgagcctacatccttattcagtggccattctatgtggctgacagtgctggctcaagtacagagggcagggtatgcatccccagaacctacaaagaacaaacttctgtccctagcatgatggaaagaatccagggtggtcagcttgccctgggcggctggctgggttcctggtggggcagtaatggaggctgaacattgttctgtgctgttggcaaattaagcagaagatgacagtgaaccttggggacagtaaatctctatattggctatatgtacagctactacccttgccgccatgatcactgccacacagacccactgagcaagcactggggtggctgggatgacactgactcagcttcacagggtatgttttacacacctgattgacagggctcctttgcagcaatactctttaggagttgtggtttaaatgtatccccctgaccgactatgtgttaaaaggcttgattctcagtccagggtgttactggaaggtgggtctttgaggaaatcaggccaattaagagattttaagtcactggaagtgtgccttaaaaaggagtggtaggacacaggctcttcctctcttgttcctaactgtgagggaagggcaccgcctacccgggcccccaccatgataagcttccttgccacaggcccaagagacacaggctgaaaaacatccaaagctgagcccagacagaccttccttcttcttagcctaatgtctcagatgttttgggtgctgactgacaaaacaaacaccaaaaacaatcttcacatggtgtgcctatctggagagatccatccacacactctgtccccagacctccaggtcccccgccagctgtttccttcctcatgcccgagtgactgtagatcccaaattccacacatctccgggccaagcacacaaataaacttgcctgttgatgttctgcacacccaagttctgcaggccacctggagtggggttgcatggcttcagctgtccactgtctgcccgtgccagcatatcctgcaaagccatctggaaaccaggcctgaatccattccttctcctccaacattctcggaggtcctagggacagagtcactgtggaaggcatctgcgccacctgctcacacagcttacctgtgccttctatacctgctggtgcccagtctctcatgtgccatctccacagggtgacaggctgctgctgtgcaagcccgcacgtggctcagtgagtgagagggcatgcggtacatgctggctatctgaggacaacccgtggccaggaattgatggccatctgcaaatacaccacacccttgccccctaaccctggaggtgtgacctacaattctcttggtagagcttgcccaaactgcatccaatgtctccacaggccaaagccactttaaacactgttggatctgctggatcacagggccaagtgaaactagcatgcaagaggtggaagcaggagaatttccctgagttcaaaaccagcctgagctatttagcaagctcaaacctggcaaagggcagcatgagcatgaggaaatgtcaggcaccctagtgtgtgccagtgctgggaaggaagatgggggggcgggggatatcccagggcttgctgcccagccagcctagccaatcagtgagctccaagttcaaaattaaagtggagaagcaattaaggaagtcaattgcaggcctacacacatacacacatgcacataaacaggcactcaccactgttgtgtgaaatgttctttactctttttgcttttggggggccggccactcagcttccaaataaatcacacacagaggcttattctttattatgaatacctggcttgtttgttgtcagcttctcttaccgtaaactccatctaccttttgcctctgggcttttcctgttctctttcttctataaatcttactttttgccaggtgttggtggcacatgcctttaatcccagcacttgggaggcagaggcaggcggatctctgtgagttccaggccagcctgatctccagaacgagtgccaggataggctccaaagctacacagagaaactctgtcttgaaaaaccaaaaaaaaaaaaaaaaaaaaaaatcttacttttgcagtggtggcctttagtcccagcgctttggaggcagagacagactaaccttgaactcacagagatccaccccctctgcttcccaagtgctgggattaaaggcttgagctgccgccaccacccagcctcactcttatttttttacctaaataaaatattctaaacaatggtatctgtggtaaactgattatattatttcttattcttaagtaaaataagtgcttaagacttaaaataaggctggagagatagcttagtggttaagagcattggctgctcttccacaggacctgggttcaattcccagtgcccacatggcagctcacagctgtctgtaactccagttccaggggatctgatgtcctcatacagacatagctgcaggcaaagctcctatgtacataaaataaaagtaaattatttttaaattttatttatttatttatttatttatgtttttcgagacagggtttctctgtggctttggaggctgtcctggaactaggtctgtagaccaggctggtcttgaattcagagattcgcctgcctctgcctcccgagtgctgggactaaaggtgtgcgccaccactgcccggccaatggcaggattttaaatgtcacacctgtgacaattctcttggcacctgacccaccctttgtgatatgctttccaggggtagcagggttgagtaagaagacctctgtcatcaagatggtgacacttctattgtggagaacttgactcctcagccgccagaagtggtctgtgtttaacaccaggtgttactgtgagcaagccggttctaggtgagacctcctctcccatcctcctgtcctctgaagcacctgcagtatctctttaaggatgatagctttgggaaaactaaaatgtataaattgctagtgacatatcaaaaattatctgttttcttccaaagtaattgagtttttagaaagcacacatatggactgggcagcggtggcacactgctcagaatctgcctggccacatcacttactggtcctatcaaggggctgtgggaatccagaagaggagtggtctcagcatcagtggcgcactcctttaatccatcccagcattacaagagacagaggagggcggatctcttaactggagaccaacctagtctatagagtgagttccaggacagccagggctacagagagagagagagagagagagagagagagagagagagagagagagagagagagagaagacaaaacaaaaaaaaaatggagctttgggggaagcccctgaaaatctgatgatgaccttaaggtaaaggtaggatgtggccaagcggtggtggcacacgcctttaatcccggcactcaagggaggcagaggcaggtggatctctgtgagttcgagaccagactggtctacaagagctagttccaggacagaccccaaagccacagagaaaccctgtctcgaaaaacaaaaacaaaacaaaaaaggcaggatttggctggaaggaactgagaggcgttggaacaaaggcaatgaaatgcaagtgggaaggtggcaggcctttgtggagtgtcaactggacacagtctggtcacctagggaggggaggggagggggaggggaggggagggaggggagggggggaggggaggggaggggagggagggaggggaggggagagggaggggaggggaggggagggtcaatgaggcttaggtagattggtttgttctgtaggtatgtctatggggaattgccttggctctgttagttgaggtggtaagattggcctgttgtgtgtggcacccttccctgggcagggaggttctcaactgaatgaggaaagctgagtgctagcggccttcgtgagttcatggttctctgctcatggtgcgacgtgaggctgcttcaggcgcctgctgccctgactcccctacaatgatagtctgtaacctggaattgtgagccaggtaaactccttctcattaaagttgtttttgttgggggtattttatcacagaaacaggaaaagaaatggagacgtggggacaatagcaagagatacaatctgaagccagtactttggggcttagattccacaagacaaattcacaggcttagttttctaaaagttttttcatgtttctattaaagagatgtctgcaaacaaacccttacttgatgagaagtttaaacataattacatctagtatattacatacatatttcattgctttattaagtccctcaaactacatagattttgtgaggtgtgattaacaactctagaatacctccttacaacagaagagaaaccgtaaactcccgttctgtggggataacaggtgatgtcctatcataatgaccggggggtgcttgcactgctggtggcccagctcacttctacccaattccagtgacattttctggctataagggtttgtcagtgacagtccattctggtgatatttctccaagccacagtgattggatagttaggcatgtgaccacaagggcatgtgaccccacaaggtccaatctggacatgcctttaaacccagcacttggcagccaggcaaatctgtgtttgccagcatcagcttggtctacatagtggattccagccagccagcgattacagagtgagaccccgtctcaaaaaaatgcagccgcgtctggtggcagagacttgtaatcccaggtcttcagagctgaggcaggaggatcacacctttgagacctacttggcttagagcatgatcacctttaatgagagcctgtctcaaaataagactgtgtggctcagtggtagagcacttgccctgcatgctgaagatactggttcagaacccagaactccagaaagataaaagagggagggtgtgaccaaataagctatggcaagctgctgtaatcagcccagccttctctccccaccccactcccagtgtattttcatgtgtgtgcctgtgggcgtttgtatgccacagtgtacatgtagcaatctgaggacagcctcggatggatgctcgttggtcttttcctctgaccttgctggagatgggttctctgctgttattattccactgtgtcacaggtcagctggcctgtgagcttccggggtttctttgtctgaacctcctggcatcctttgggaggtctataatcaccccagttcactatacatctggcttttatgtgagttttagggactcgaactcaggtcctcacacttgggcaggcagcacttttacccactgagtcatcttcctagcccataccccagtttcagaaaccggaaaccgtggagagaaactgtgctcctacctttgctgatataaggctgctgtgaggccttgatatctgggatcctcaaagctgaggctgacatgagcccctcacaggactgctgtgaggattacaaagatagacaagggggtgtgtggctcagatagacatgggggggggcgggaggtggctcagtcagctgggtgccatggcatggacctaggaccccagggcctgtcaggtagagactggaggctcctggtgcttactggccaaccagtctagccaattggtgaggcctaggtcaagtgagctaaggtggccagatgtggtgatgcacgactttattcctagcactcaggaggcagagacaggtggatctctgtgagttcgaggccagcctggtttacagagtgagtttcaagccaaccagggctacattgagaaactgtcttgaaaaacaaaaaacaaacaaaccaacaaaccaaacaacaaaatcaagacagttcctccataggcatgccctcaggccattctgatgaccgtaatttcttgttaaggaattccttctcagaagactccagcaagggttgtaaaaattcctcaggccgggtgatagtggcacaagtctttaatcccagcactccctccaggcagatctctgcttgttcgtttgtttgtttgttgtttttttgagacagggtttctctgtgtagctttggagcctatccttgaactcacagagatccacctgcctctgtctcccaaatgctgggattaaaggcgtgcgccaccaacgcccggccagatctctgcttttaaggccagcctggtctacagagttctaggataaatagtcaggtctacatagagaaactctgtctccagaaagagaaacaagaaagaaaagactgccatgtaagcatccccctcgacccctctaccttcccattcccccaccccagggaaggccttctccctctagttaatccttcctagaaatacctcacagacctatccagggtgcatctcttaaatgattccaaatccaatgaaactcacaatcaggattaagtatggtacacgtgttcttgtgtacacacataccatggctaatctagttactcaacatggcaggtgcttaagaaatggcagctcttctcacatctgcttttggctcaaaattctgacatatataaaccagtttcttcttggtgtcctggaatgcacaccttactctcttaagtttttgttgttttattttttattttatttttgctagggttggaactccaggcaaacactattccggccctctggtttttttaattttttttattttttggtttttttgagacagggtttctctgtgtagctttggagcctatctttgcactcgctatgtataccaggatggcctggaactcacagagatccacctgcctctgcctcccaactgctgggattaaaggcccatatcaccaacacctggctggccctctgtttttataccctaaagggcagtgagggtcagcacagcacacatctggagacagttctagagagttgtgctttacggagttctgaggggagaagatggagcctctgcaagagcatgaagcagagatttcacggccagcaagctccatgggacctcctgtctcttcatgagagcctcctgtgtctgcgtacacttgtgtgcatgcgtgtgccagagtgaatgcgtgcactggtgcacacacccatacactcactcagggctagggttacaaactcctggctgaactcaggttcttgggcgtgtgtagcaaatgtccttaaccacagcaatctctccagtcaccagaggtcacagcctgaaggagcagggccaggtatcagcaagtcacatgtgatactcacaagtgccaagaaacagtcagccacagcccggagagacacttctaagaaggctacttggcaaggagctctggaggcccgggcctgtgaggccagggaggctcttggagtccactcctggcagccctcaggccctgctttgccagactccacgggaagcccccgcctcctcatggcacagactaaaatgatagcaggaaggacatgtggactttggggtcaggggaccctgggttccaatgccagattcccaggcatcagtcatgtgaccttggtcatggggaacctggggagacacagctcattcagtgacagaattagatcaccagttaccctgtctctcctgaggccctgtgagttaatggaatggcatgggtgaccgagctgggaacgatggcctcccagcaaaggcaggatcctgtgcggaggaaccgcaacctgacgtggctgctttgtgcactggttctctgttttaacacagaaattaggctgttggtacaccatcaagcttgagtggtaccctgtcccagtggcttactgtgacacgttggcagacacattcaggtccagacccagagctctctgagtgggctttttgaagttgaagccatttagacacctgaggctcggcactgtcatggattctcccattaccaatggcaatgtgcaggtcaacgatagctccactcccacaacatggaaaaggagagtgagaaggggagaggggattggcctccaagtctgtccaaaattgcaaggcacaagcaaggccccccaggtcttgtggagcaggaagggcggtatgaacgcaggcctgggctgagggtgtattatcccctcttgggacagcctcagacagtctgtacctcagttacttggcctatagaatggtacagtcacctgctgggcatgatggcactctggaggcagagacaagcagacctctgagtatatgaagccaacctggtctacaaagcgagttccaggacagccaggactgctacacagcaacaccctgtctggggaaaggggaagaatgtcacatcacacccgcctttctgggttgttgaatgagtgaaagctgagcccacacccggtacagcctgaccttggttagagaaggattcagggacttaccagagaccaagcagggaaaggaagaaaagtgggactctatgcagggtcattactgtgcccttagcacctctgctctgttcagagctggtgcgtttcccctctgcctgcaacaaactggcaaagcctccccactccagggaacctcagttcaaaagccaggtttcagcgagatgtggtaacaggtgtcttcaatcctagcaatcagcaggtagaggcaggtggatctcagtgagtttgaggccagtctggtctccatagagtttcaggccatccagagctatatagtgagaccctgccttgaacacacacacacacccacactcacatcttagaaccttccctaacaagtccatctagaagacatccctcttccaacccccagcaggattcctgcattcatttgtcaaatgatctccctgggtgggagcaccacctggggaagggacagtcccttgtctgcagagagaggggagggacataaggagaagagagactctagcccaacagtccatgtcagggctggacaaaggcgcaggtgaagatggaagggaaactcacacaggtcttggtttcagacaaccagggagttggggagacagagatctgggtaatgggggcagtagagagatgaggaaggggaccaaccagaaaagagactgttctcttaatacgtggcacgtgtctcttggtgtatgcctgtgtctgtgtgtgccagagtttgtctgtgaattttttggtttggttttggttattggttttctgagacagggtttctctgtgtagctttggagcctgtcctggaactcactctgtagaccaggctggcctcgaactcatagatctgcctgcctctgcctcccgagtgctgggacttaagacgtgcgccaccaacgcctgactgtgtgatgtgtttttatttgtgtttgttttgagacatgcactaggaagcacaggccagcctcagatttattgcaatctcccaagtgctgtaattaaaggggtttgcaactacacccagccttattatgggttattaagtcatgtgaccaggagtgcctggcaggtcagctcagtaaggaggctgtttcaggcttgaggccccatgtactctcctgccttgagacagggccaatgccctgaggagcaactgctgctccctgcctcctgtctactcctgcttgtcacaggctgtgctgtctcctcttgagtcatggcaggacacgcacccaggcggctcagctcaccgggcagcaggcccagaggtgtggagccttgtactctgggaagtcccagccaattcaatcttctgttgttgtatctgccctgctctgtttactccctgagtgatggggatggggacactgctgagaggggaggcccctgcacctggtctgcaagtccagatcacagtgactacattcagttttggtcatcattcaaccacgctgaatggccactgagggggatggagcccggagagcaaggccctgccctacccagtgtctccgggatctagactcccagaagagccaccgtgtggacaattaggtcactctggcatgggaagacagagcacagagcactgatgcttttgacccagaagtgacatgggtcactgccagttgtagctgatgggccaacgcttgtccattagtcagaggtcggagctgtggaagatggaaatgcctgtgtgtactcactgggtaaacaaagcctgtgcagcctggttaagtgccacattagagacaggccagttcttgcctggacatggaaactggatgctggagggtatggggacagggcaacttcttagttcatgtgggacactgccccactgcttcagggccaccctcactcctcagccctggaccgtcttggtccttctcctgtctcaccaaggcccctgctgcccaggagcctctgccggattcccctgactcctcttggaatgttccacccatctctgctcactggactccttaggagacatcaaaggggaacagagcaggagtgggggacggcaaacaaaggcacagtggagatgaagcaaaatagccacatgtggtgccactcagagggccagcagcacctgagcagcccatgctttcggccacacacaccgtctgtgtccaggagcaacaggcattcttccatgcagactgggtggagctcccagtttgggaccggctcagcctgactcctggttcctctggggacatggtgcatgacaggtgggaggcaatggtagcttcaggggacacagtaggtatgtaacctctccaccttggttctaggcatctctggaaactggaatgagaaagggccattatctgcttggaaagttagcagagcttggattgtgttagatttaacagggaagtctgcacatatacacaaaggctccatccctggggggatccctggggctaatagtggatagcgagaaaggcatctcccaaaagctgagatccctagccacccttgttccttatggacttgtatctccttttacatgaaaccctgggttacacacacacacacacacacacacaccagaatttttgtgtacgggagatattcaggaatcagggctgttcagagtccccttttgaaggttctgtgccaggtcctggaacacacatcactgacccactgtaatgcattcagcttttaccttcactcttctattttttttagaaaggctttctttgtgtaacatctctaactgtcctggaactccagttgtagaccagtctggcctcacagagttctcctgcctctgcctcccctggcactcgctctggagatcaggctggcctcaaactcacagccatccgcctgcctctgcctcccgagtgctgggattaaaggtatgcaccaccaatgcccgacttcacctttagtcttaaaaagcctaattagccaggcacaatggcgcacacctttaattccagcattcaggaggcagaggcaggaagatctctgtgaattggggcagcctgagtcaacataaggaatgagctccaggattacacagagaaactctgtctcaaaaccaaacaaaaacagaaagaagaaaaagaggaggaggaggtattgagaatttgggactagccaactcagagggttctatgccctctgctggcctccctgggcaccgtggtgtacagatagacagacacacagacaacacacccatacacataaaataaaatgagaagaataaaattccctggagctggagttagaggcaactgtacaccacccatgtggatactgagaacaagtaagactcctgcaagagcagcaagaacgctcttaaccatggagccatctctctagctccaataataattaaaaattagtgtggcagctggatggagaaatgttcgtggtctgtatttagatttcatcaactctacagttgaaaaagcagatgtctctactatagttctagacataatgaagactttaaaaagctgagtcaataatattttttcaatttaaattattaattaaaattaaaaaatggttcaggctagtatccaagcactcaggagacaggggtgaatgagagagaaagaaagaaagaaagaaaaagaaagaaaagaaagggagggaggaaggaaggaagaaagactttgaaacctaacaagaggcaggctgatctttgcattcatgaccagcctgatctacagagttccaggccatctagggctacatactgaaaccctatctaaataatttctgtaatgtcatgtgtttcataagtgcaggtggctggctggtggttcggggggggggggcagctcagaacaggcaggtttgtgtgtttgctcacttgtgtctcccaggtgtccatgcacccacaccatctctgcgtggagacctgtctgaccagtacttgctcagccctacccttgaatgaccaatgaatgcatcaaacccagcatgcccaaaactgccctcctgaatccgacactgctggtggaaccagcaaggcttgtcttcatcttagctaattggcctgtgaggctggcttgctcattcccaagcacgggatcccaattccagccttaaacaaggctacaagcacagttctgtcttcttcctcccttccttgagctttcatcgcctctgtcttattatctgttccactgctgttgttttattatattttatttttcgagacaggatttctctgtagctttggagcctatcctggaactagctcttgtatataaaggcctgcgccaccaaagcccacgtagcaataatttgttaagtcaagggatcactacctagctctccttaactttgggcgatcctcttgcttctgactttcaggtgggcagaagactctactatccaggacaggtgcccctgtcggaagcggtgaaacctgagactgggaaccgcagccgctgtcaggggagtgggcggctgttgtgttcgggtgtttctgatggatctgtcctttcctggcagctgggaaggagcgggtggctttgatcacaactgctgctgggccagggagtcctggagagagggatggcgctcacctatgggcagcagcagcagggttgtttggatgctgctaagtgaccagagaccagagaagtctatcctacccgggaagaggagcctctccacccctcccccgcaggagggcagggtggccccgggcgagcgcgctcccgcgctcccgcgctcccgcagatgcgcgccctggcgtcgggactccttccttggggacctggcttacaaaggccaggccagccctgcaccgcggtgtctgcgacgggccaccgagtgggtccccgaccaatgaaccccaactttagagagcagtggctccgggggtcccgcgggtcccaggctctctgtcgcctgccccgggaggccttttctttctttgggccgacaaggcggggtcatctaccgcgaagacgaaaatctttccaggaagtttgtacctattaatattccagttcctggcagccgctctccgcgccggggagggggcagggcggaccccgcagctgcttctacagccgaggcaaggggcggaggggcagctcctaggtccccacaccacggcgggggcagaaaccgctccgaggctcaacgtgccggagcccggaggtttgcccggagcggcgcgcggtgggacccggaggatcccgaggcccagacgaaaccaagagctgggacgcgggaggggtgtgggagagggacaggagggatcggtgcctcggggaggggtgtggggcaacccggggcccgcacttgggctgcgccgctccccccaaaagaaagctggtccgggaagctggagcccgcggccctggagaggtcgggaccctggtcctgaccttgctgtggtaacacagccgcagggcgctgcagcagaaatttgatatttgagagcctacgggctcctcgccaccaccttgcacgacggccactgtctccatcacagacggaggaactggagctcacgagcagccgagggactggcgcgctggaggtcgtggtgtggtcagccaccgcagggacccgctgtgagccaggatctcctcctagaaggaagcgcagctgtcctcctgcaggagcggccagcagactcctcagccccgggaaccaaccgcagcacccacccggagcttgctggatttgcagaagctctttcggggcccaagtgccagctcagtctttctgtctggtcacatgtgggacataaatcactttgtcaaagcacccgagtttgtaacgccgctggggcctctgtagataagctttgactggagtgtatgtaggcttctgacctgggctcgtcaagtgctaactgaccccgagcaggaattaagttcctgtgttgcactgtcttcctcggcattctagagtcgtttgcaaggcgctatggcaatcttcctgcccacgatggttaaaccttaccctgtgcggggactctgtccacctctgtgtgtccttcctgtccagccaccaggtcaccagtgctgagacatgaacggacaaaggtgtctcaacacccgctcctcgcctgcctccgcacgcacgcaagcctccaaccttcagggtctcttggtagcctaggatccatgtacaccagtgggcctgaggggatgctgtgacagaatttggtatcttttttgggggggggagggtttcgagacggtttctctgtgtagctttggggcctatcctggcactcgctctgtagaccagactggccttgaactcacagagatccgcctgcctttgcctcccatgtgctgggattaaaggcgtgcgccaccaatgcccggctcaggatttggtatcttaagataggatttgccaactagaaagtcttcccatagcccttctcctgagaaaaaatcctgaaaggccaagtcccaaatggagtgagtgtgagacccatcgagggtggcctcttttctgtctccttggagtgccaggtgtggagacctctcctggactttcaaccgtcagcaggagatgccttttggaacctaaagtccacaagcatggctgcctcctcagctctgaagccttcttcgggttgttttccttcacacccaaaaggtacaacgaggagaaggccctgtcaaataaatgctctgggttcagcttgggtgagccaggaaacccattgccttccctgaagcctgctaggttgctacgcacaggtccctgggaacaatgaggtagcatcagctatttcaatgcagagttaggcacacaatccttgctaaaaataaatacaaaggaaaaccccaaagtagctaagcctattttcataccttttttttttttttttttttttcttgcttggggctcttttgtcttcctcttgttacttggtggctggctggtttttcttccagggcctaccctggtcctggacatgcagccataggcagaaacagaggggagaaaggggacaatctaaggaccatttatttgagtgaaatttacattaagtgggatgatggacccctttcagagagagacttgggggagctcaggggtgaggatctccctccccctgagcagctcttctatggagaaaggctttatttatttatttttatcttatatacattggtgttttgcctgcaagtatgtatttgagaatcagatccccttgaacagcggttacagacagctgtgaactatcatgtgggcactgggaattgaacctggttcctctcaaagaacagcccacagtgctcttaactgctgagccatctctccagtgcctggggaaaggagttttgtagagcaggggatgaagcatgcctcaccccatagcagaggacaaatctgagtttctttgggctcctgggggcatcacctcatcactttagaaacaaaagtgacaaattgtgaggatgacccctccctttgtgtgatctattgaggggcagtagtgcggattttctctgccagcctctcccccacttctgaggacctctgacttggccaggagccagaactgctcccatcactggcttgttgagggaacttgggagttccactcctgctgaaacacggcattctcgcttttcttgtctgtctcactgctgctgagcccacagtgccttggcacccgccctgggaagacagaagtgagcttcttctcccggcggggaggggacctggtaaccggttaacgatggcaatatcctaggtaccctaggctggaagagtgcgagttaactgggagcagagggcccagcctgggcagggagctccctaaggatgagggaggccccagcttccctctgtgtcccctgtcctactcagtgggtctttgggctggctcccgcagaacactgccccatctgctattttcccaaggatttgggtgtcactctgttgtgattctccagctccagcttatgtacttaagtatttatagagatttgggtgggctagagagttggctcaagggttaacagcactggttgagcttctaggggactcggttcaatttgcagcaccctggctgcccgcaagtgtattcacctcctgctccaggagaccaggagccctcttctggcctcttccggtactgcattatgtcgtgcatagacatacaagaaggtaaaaaaataaaaacatacacacataagaaaacattttttcaccgggcattggtggcgcacgcctttaatcccagcactcgggaggcagaagcaggcggatctctgtgagttcgaggccagcctggtctccagagtgagttccagataggccccaaagctacacagagaaaccctgtctcgaaaaaacaaaaacaaaacaaaaaaaaaaaaaacacattttttttttgtgtgtgtgtatcggaactcgctctgtagaccagactggctttgaactcagagatccacctgtgtgtctacagactgttgtaattaaaaggtgtgggccaccactgcccagaattatcttgtttttcaagacagggtctcatgttgcccagatacgcactatattgctgtcgatgatcttgaagttgcagccctcttggctctacccccaagtgctaggaatacccatgtgtaccaccgcacctggctttttttttttttttctctcgagacagagtttctctgtgttgctttggagcctgtcctggaactcgctctggagaccaggctgacctcagattcacagagatccacctgcctctgcctcccgagtgctgggattaaaggtgtgcgccaccaatcccagcacgcctggcttttataatgactttgcctacataccggttgggtaagcttcacagtcacatagttcagagttctttctttgtggggctggggtggaattcaggtcctcttgaatgctaggcaatcagtttaccccagagccgagcccagcagttcatactgtaaaaaggcagaagggagccagccaagggtggcgaccatacttttggttccagctacacaggaggttgggtcctcaagagcttgagaccagcacagggcaatggagcaagccccagcgtttggtggtggtatcttttgcacttttgtttgtctctgttggtgcacccatgtgccctggcatgtatgtgtaggcaggaggatgacctggacatcagttctatccttctgccgtttgagtccaagggatcaaactcagtcctcaggcttcatggcgcatactgccacccactgagccatctcaccagttctggtcatttgcattgtttttatttgtttgtttgttagttttgagactagggatctttctctatgacccaggctggccttgaatttgctacaatcctccagcctcagcttccccagtgtcattcctcctttaaggaagttcaacaagatactggcacatggtaggcaagtgctccaccaagtctagatcctggctcataaggaaatcaaaggggcagaggggcatttggggacaaccggaaccacccttgcacctccacccccagcatctgactggctggatctgggaaaacaggctctgttcagtgttccaactgagaggttttgcctcccagatatacagagagcatttctacatccatgggtcaagtaagcacctgccagggacacctccagccccaggacaggaggggactgcctcaggacactggcttgatggctcagagcaatgacaaccaagactggaggaggagagggttagattgggtccaagggtggggctagctggccagtacaactactgatggcctcacttcatcagctcatgtctggaaagccaaaggctctcttttcttgggctaaagggagtattgtttctcttcttcctgggctgccccagctctctctttgccaccagaccaacttaaaacctcagcagttagaaaatacttgttctgagtttcattgtccccacagctacagagttctgagggcccagccctgtcccctggggcaagggctctcaccatttgtcactcacagttgtgctgtgagtgacaaagcggttgttagtatttgtggggaactaggtctgagcaggggcctgtcctctctggatgggtcggaagctctggtgcttaacagggaggtgaaggaaagagaccacacacaaactaaataaaaatgtacaattttaaaacatttatctttttttcattgtgcgtgtgtgtgtgtgtgtgtgtgtgtgtgtgtgtgtgtgtgtgtgcgcgcgcgcgcacatgagtacagaggcttcagattctctggagctagagttacaagcagttgtgaacagcctgacctagatggtaggaagtaaactcaggtcctcagaaagagcagcaggtgctcttaaccactgagccatctctccagtgtgcgtgtgcctgtgcctgtgtgtgtgtgtgtgcctgtgtgtgtgtgtgtgcctgtgtgtgtgtgtgtgtatgtgtgtgtataaaggtacccaaggagccaaaagaaagtgtcaaagccctggaactgaagtgacagccacttaatggaggtactaggaacctaacaggagctctgcaagagcagcaaggtctgagccgttgctccaggcccccagccccgccccctgctctgcccaagtgctgagggtccaacctggggcttcacacatggtaggcgcgtgttctacatctccagcaccggcccgctttgcttcctttgcttattgtcttcacatttacttatgtgtatgtgtgtatgcatgtgtctgcacaacattcgtgtaaaggtcagaggacaacctgagggttctctccttccaccatgtgagtatgaggattgctctcaggcttggtgacaagtgcccaggcagagtcaatttaccagctatcacctttattttgagataggagcacactaagttgcccaacctggccttgaactggacctgttgcccaggtaggccttgaactagaaattttcctctgtctccagaattgttcatgtgatagacctgtgtcaccagtgatattttctcaagaaaggtccttcacaggcaatttgggttcaactagcgagaccagattccagaagtgaaggcttcatttgagtctcaagttcccttagcttttcttaaggcaggggaattctctataataccaaagactgccacctccttccaagtgctaactttcccctctcatctcctcagtcactttgaaagaatttacaggccgcaaatgaacaaccatggtttctgctgatggccagggaggttgggagaggatggcctgagcaggtgtttggtcccttggaggctgagcagccaaggtcctctagcttcgagggcccagagaggtgccccacagggctgagtgtgggaggaagggctgggaagtactcctcacgctgagcagacagaagcctgaatctgggaggctaaaggaccattacaaaccacacagatcagtcacagaaccctacttaaggagtggaggtggaggcgagctgtaggagccccgggccaggtggaacagaagcttgactctgtgctagagtggatcagagggaccaggagccacccaggcccagggcgcctttgcggtacacagagctctacctggtagatgacagttggcactgtcctagcttccattgctacaacgcctgagccagtcacccagtaagagagaaggcttcctttggctcacagcgtcccatgatcagttgactcagatgctccaaaactccactgtaatggtccatcatgggagaagggttcggtagatgaaagccagtcacggctcagggaagagggggacgggatcccactacccgattctcagcgcccaaatcaccaccccctcttaatggttgcacaacctcccagtggcaccaaactgggaccaagccttgcatacatggggtacactaattaaaacgacagcagctctgtagcactttcaccagcgtaatttttacagaacaattacatccaaatccctagctagcctaatgggagagtgatttgcctgcatcttattcgctgagacattttacatttattattattttttcccatgcaggtttgcgaatgggcaggacagaattcttactgaaaagaaagggggcagggcagaattcttactgaaaagaaagggggcaggacagaattcttactgaaaagaaagggggcttcggattgtggttgccatgcgcatgaacaagatctcagtctggggagaggagtgcactaggacctggaggctccccactcccaccgtctttgaaacataaaaagcccttgttaagtccctgcagggagcctccaagggtccccaggccacctctactctactgcccgctggagggagcctcggaatcgtaccccattatccaggcggtgctggctgtcacagccagagacctagttcaagtcgggccagcgcctggtggaggtcacacagtgacccaactgggttctgggctggtgatccctgttggttcgggtcctggagagggccatcacggtggcccctccgcagagccagatcactgggtcaccctgcccaggggcaccgtgtgaccaggccgggtctgatccccccccccgcagcgccctggcccgggtcccgcgcccggggcggaggtcctgctcgtggcggcgctcgtgcgccctctggtggccatctcgggagcctggggcgcagggtccccagaccgcaaagggcggggtgacccagatccacagacccacagagtctccttgtttgcagaaaggaagcatgctttcgttgacacttaagttcctggaagccgctggggaacacctgggccaccaaatgggcgaggagtgctcccgaggcctgtgccctgggaggagcgggcggggagcgcgcaaccatcggaaatggtggctattgtgctggtgtcgcaacctcctactcccgagccgtggacccgccactggatgccgcacatcctgggtgggaggcctgaggccagcaggccgaagtggaagagcccctagtcattgcaggggacacggacggtggctgatcctccccctttcaaattctccttgttttccgaacttatcagaggctgcagatcaacacagactcggttcttaggttcttgcctggaaatgtgacccggacaccgctgtgctgccctggcaacctgggagggccgctctacccaggcacaatcttgagctgagatccttaacccaggcaacttcccccgtgctgcagcgggagccgcaggagagagatgggagaagctggggtgggggtgggggtgagggtgggagtgggggtggggctggccttagtcctggttctgctggggacctctaaggaagggagctaggtggggagcctcagcagagtcccctctacagtacctgctgcctgatggagttggcccttagctccggctgggcggggaggatgggtggtttgagtctgcaggaatctcgaggcctacagagcaaggagagtcccagggaggagcaggctttccttctgctttgtatgtctggaaagaaggttggttaggtggggaggaatgtgaggaggctgggtaacgcataaacaaatggagtttgtcttcagggtttggaggcttgagggggtctagggagtgtagctccactggtaaagtaccaacatgcaggaaggcccctcaagtttgagccccggggtggcgtaaaaccagacacgatggtgcacatccgtaatcccagcaccggggcaggtggagacaggaggatcagaagatcaagatcaaggtcatccttggtgacagtaagttccagagctagtctgggctatgtgaccctgtctcaaaaccaaaccaaactaaaccattgttgtagagggtgggaaggctgatatcaaggcctggtgggatttggtgtctggggaggctctgtgtcccctcctatggtgacactttattgttgcttccttcaagggaaacatgtttgtcctcacacggagggagggggtccttgacaaaaggccacttcctccaacctctgactcttctataaggatcccaatctactggggagggatcctcgagagaccacctgacactgtggagctgagacaccagcatccaaactgtagtagtttcctgaggaggcagcccctctgagcgccagcatttaaagtgacagtcacgccccgtaagtttgtccaagcatataccatgatgaaatgggccaggcatgtgcacttcttccagttatctctagatgtgcctgctggaggaaaagtggcctcccactcagcgggagtgtctcctctagatcaaatggttggtccttggctgttggtgctctttggggaatctttagtagatggcacctagctggagaaagtaggttatttggggcaggtgcctttgaaggtgatacagagtacctgtcccttcttgtccccacctccatttacctagatgtaaacaacctggttcccacaccctgcctcgttgttgagatgctctgccttcactgggaccagacttgatggactaaaggaccgtgggtggaaatctctaaaccatgagctaaaatatgtcctttacctgccttcagatggggtttctctgtatagccctggctgtcctggaactcactatgtagaccaggctggccacagagatccgcctgcctctgcctcccaagagctgggattaaaggcgtgcaccaccagtgcccagccaagtccttcattctttaagttgtttccatcaggtactttctcacaatgacacaaaaatattcatcacagtctgcaaagcctgggacagcacaggtgggagccactgagcttcctgggtccccatttacccagaggacacacacaaaacaattgtctcccactgcatggaaactgctttcagtgagtcacatcctgactacgtgctggtcctgatgctgctcctgccgtgcaagcactgctatctcgcttatgtggcctatggccttttatgctgaccaggtggtgttactcacttgtaacaccaggaagggccacgcacctggcttcagctccagaggtctgggcattgaaagctgagcagctcagagaactgctcagaactccaaagaaagtgtggatggcactaggtatgatgatgccgcccttaatcccagtactcaggagacacaggtaagcagatctctgtgagttcaaagccagcttggtctacacagtgagttccaggagagcaagggccacatagagatgccccgtcaacaaacaaacaaacaaacaaacaaacaaaaaacccacaaagaataaaaagtaaataaatccgaatggatccatggaagcactgtgatttggagggagagaaaggagagacagtgtcatagctcaaactggcctggaactcactatgtagccccagtagcctggcactcaaggcaatcctcctgcttcagcttcctgaatgctgggattacagacgtgaaccaccatgcccggcttacattatccttcagtgtgactggtagaagttcctctaggacagggttaaggtaccacagaatggacaccagcattggatggacatttgtgctgtttccctctgctgcatcacggacaccagagactctttgctgtttgtttttcgaggcaggatctcacggtgtacccaagactggcttcaaactttccaacctcctgcctccgtctccagactactgagattacaggtgtgaaccaaagctcatcttaggtactatgttgtacaaacatttgagtgcaggtctggggcctggggggcagtggctctgtctgaggctgtgttggtgccatctgcaggtgtgctgatttggtgttggccaggcagctggcactgtgtgataagctgggtgccagtgagagactgggctttggactgggggctcaaaaattcaaagcacagcacagtgtggtagcatcttgtacttataccactccagaggctaggctgggctatatactgagagcttgttcagagagggagggagggggaggagaggaggacagacctgaccacttactgccaaccccgaaggtctgagtggaatgcccaggacccacacgatggaagagagaacaatcccctgtaagttgtcctttgacctccacttactcagtggtgagtgcccctaccccacataaattaatgaagattttagaaagggaaacagggcagaatgtaagaccaagtaagtccttgcatgtccagatatgtccactaggtggaaccaaagctaacaagatcgccttccccggcggcctcccaagaagagcgaacaggtctgacccctgggctcctgaagaccgggatgttctctccgaaacctggctgagccgcatacaattaattctgagaggttgagacttggggagtatggcggctgcagatggtcacactggctgtgtcccggccagaaacggggctggaatgcaggttgtggcacagactgcaacagcccaggagagctacagcgtctttcaaatctgcacaggttcagagagagctccacagaggaggggcaggaatatgggcgccactgttgacctctgcagaggagccagcagcagccgcagaaaagaaaacgcaggaccagctggaagacctgccatgtcgggcatgcaggctcaaggatgactctacaggtcccttgccccaagtggaatgtgctgggcgggaaactgaaagacttaagtggacaccaggcagggtacagtactgaggcaagaaatgactcgaactcctttaaatcctcatccacataagggcctatctttgtcttcgtgtatctaggaaaggaacagcagcagcagtcagtcactaactgcggagccccccacccccaccccgaccctaccccacccccaccccctggctgcagggccacatctgtcccactcccagcatctaaaggtatctcaggctccaagtaccagagagcaggtttgcagagcactagctgcagtctcagtacatcctacaatgtatgtgtcccagaaaggaggggcagaggaaataaacggatgctggcaaactgaaaccagtgatagtgtcgccaaagacggcagcaccctctcttccacctcacgcacttcttacaacataggccgggcagtcctccacagaccctggaatctgcttcctccccttggacctgggagttcgtgactcagctgtttcctgatggcagtgacccgcgtctgaagtccatcgacctgggagcacctgtgcaactatcaatagccagagacacccaaggtttgcgtgaggggctcggaacaggaagcaggacatgggactgagccggccgtgctggccttgagccatggagcttacaaagcagagcagggatgagctctcccaggccatgctgctgccgcagattcatgagtgaatctcgttaagatactatttttatttctcatttttcaggtggaaattgtttcacaacacctgcactgattaattcttgttaatttgacaaactacagtcacggggaagagggaacctcaactgaggagctgcctgacagactgacctgtgggcgtgtcttgattgaagatggatgtggactgtggcaccactcgcagatggccctgggttgtataagcgagcaagctgagcaagttatggagagcaagccagtaggcagtggttcctctactgttcctgcttaagattcctgcctcgcttcccttgctcatggactgtgatgtggacatgtaagccaacaaaccttctctaagtcgcttttgcttatggtgtttgtcatagcaacaaagagcaaactagaccggaacccaataaaacacaagacccaaagttcctggtggcaagccatttctgtttgcttggcactagaaggtttccgggactccagacttcagaggggagtggtggtacacacctgtaatgcaatcaccgctctccggagggcgaggcaggagctacagagcaagaccttttcggctccccccgcccgaaagactttcagtgcctccagtgacagaatgctagaccagctgcaccaggcagtaccaacaaagagggctctcaagttcaagggtgcaccagagacgcctgggggctttcaacactgcaggcagtggtcccaccccagagtttctggttaggtaagggcggggtctcatgtttggaatttctaacaagctggcctctgttgactgaagcacgaacttccagaaggactggtttcaagcaatgctgggcctggtaccttccaaattattgctgatcccagcatctcctctggggctgcccagcggggttgctcagaacaggggacagcaatgtccttttattgttaaccaaggaaaagtctcaggccttccagaaaaggtgactgtaccctttggcaacaaggctcatcccagaagagccttgcattggttgagttgagagcaagcttcagggggtcgtgcccagaagacagctgctttgaatgcttcaagaccagcctctgggaaaggaaaccagtggctggagttttaattctagaagctgcaacctccattttgagttgtggggtcggaatcaagggccaggtgcatgctgggcacaggcactagccctgggcttcctctttttctttgcttttgttgagacaggctagccttggacttctgatcttcctccccttagttctcaagtcctgggattacagggatatgccaccgagcctggcccttgcttcttcttcttctttttttttttttctttctttctttttttttttttttccggagacagggtttctctgtggctttggaggctgtcctggaactcactcttgcagaccaggctggtgttgaactcacagagatccacctgcctctgtgtctctccggtgctgggtttaaaggtgtgtgccaccaacgctgggcgctcatgcccagttttaataagttgttattgaaggtgacagagaccctgatgcaagctgctcccaggctgtgggaagcctgatgacatctgtccccaattcagcacctagttacacacgcaggctgaggcacgagtaacaggggcaacaggatgacagtctgtggctgtgcaaacccagctgacctttcacacagctcagggccgatggcacccccgcagccacctgtgccacactagccagaccctttagcagctttccaggtgccaaagtctactctagttcctgctagagaagtgacactccttgcaggggaggcagccacctttcttgttggaactggcactagtcagtttattgtagcaaggtccaaagggaggaaacggcccacatgcccacatccagcagcagggttctggggacctcaacagcctattgaggggtgcaaaggccgaaagaggcaccatcctcccccatttgactatttttattgtttactggctgccagagtgttttacacatacttccttcaacctgccagcgatgcattgctcatttcctagatgatcagaggtcacaggtcaacaagaaaacagactacctcccctggtgtgtggggatggtcagggttaggggatggttttctcccacatcaggagggcttctcagaaagctcaaccagttgaagtagatttttttttttttttttttttttttgagatatggttacactgtataggccttgctgacctggaattcactctgtagaccaggctggcctgaaacttagagagactcgcttgcctagtgctggcattaaaggtgtgcatcaccgccacccagctattttttttttttctgagacagtcttgctacgtggccttggcacacagtaacctgagtaacccaggcttgaattcataattaatgatcctccagctgcagaggatatttttggccctcttcttacccccttttcccttcaagatagggtcttactctggagtttttgaaaccttggtcgtggtatcattagaacaattgaacattgacaaggggagggaacctcttctttaactccagccctaggagaccagacttcctcttctagcctaagggtacctacactatggctcacataaccccacatagacacacacatcaaaaaatgaaagtaagccagatggtggtggcactggcctttagtcccagcacttgggaggcagaggcaggtggatctcagtgagttccagaccagcctggtctccagagagagttccaggacaaccaggactgttacacagagaaaccctgactgaaaaccataaaaaaaccaaaaaaaccaaacatgaaattaagccattaaactgggtgttgatggcacacacctttaatcccagcatcatggaggtgtaggcaggcagatctcttgtgagctccaggacagccagaagtacagagaaaccctgtgtggtagtttgaatgtaactggtccccataatctcacagggagtagcactactaagaggtgtggctttgttagaggaagtgtgtgcctgtggggcgggctttgagctgtcctatgctcaggatcccatccccagtctcagtccacttcctgttgcctgcaagatgtaggactctccgctcctccactagaaagaactgtatctgcctgcacgctgccacgctcccctctgaaactaaactgccaccaccacctcaatcacatgttttcatgatgcctcctcacagcacagaaaccctaactttaagacacattgtcttgaaaaacaacaaaataaccccaaattaaaatatatgtaaacagacaaacatcaatctaacagtatagaaacacatacatacagaaataagcaggccgggcgttggtggcgcacgcctttaatcccagcactcaggaggcagaggcaggtggatctctgtgagttgagaccagcctggcctacaaaagctacttccaggacagcctccaaagccacagagaaaccctgtctcgaaaaaacaacaacaaaaaaacaaacaaacaaacaaaataagcaaaaatatatacaggaataaaaactaacaacttaaaacatctatgcacacacactagaattgggaaatgtttttagacttttttgtgtgcaggtgtaatcaatcgtgggtgcacgtgccatggtttcaatgtggaggtcagaagacaattttcagaagttctccttctaccctatgggtaatggggattgaactcaggtcctcaagattggtggcaggtgcttttgcccactgagccatttgccaaccttgtaaactacatatattatttatttatttatttgtttatttatagattgtttatgtggccctggctatcctagaacttgcaatagagaccagtctggcctcaaatccactgagacccacttgcttctgagtaatggaattttttttttttttttttttggtttttcgagacagggtttccctatgtagctttggagcctatcctggcactcgctctgtagaccaggctggactcgaactcacagagatctgcctgcctctgcctccaaagtgctgggattaaaggcgtgcgctaccaacgccaggcctgagtaatggaatttaaggcacgcatcacccagcttaaattcaattaaacataataatatcctttgaaattattcaattgatggctcagtggttgagagagcttacttttcttgcacaggttcaggtcccataagggcaggtcacaacttgttctagtggatctgacaccctcttctgacctctgtgggcaccatgtacacatgtggtgagcgcactccagagcgcgagcgcgcgcgtgcatacacacacacacacacacacacacacacacacacaccacatgcttaattgaaatgtgtaaaggacacagggaattttcaggagaggaaattcaatcaacagaaggaatgctctattctattagtagttaccaggcaaacaaagtggaatttctttctttcttttttaataattaaactttattattattgtgtgtgtgtttgtgtatgagggcatatacatgccacagttcacatgtggaaattagaggacaactttgtggaacgtggatttctccttctaccctcacatggggtgggttctgaggatgaactcagctggtcaaatagcacagcaagaacctttacctgctgaaccacttgaaaattcaaagttccaaataccttctgagcactgatgcacaagtggagaaaaatctgtaagcaatctcacttgatgagttacagtcaaatgcaggcagactccaagtattgaataaaacttttcttcaggcttcgagtataatgtgcatcaaacagaaatgactatcatgctcatattcaggcctcaagacatctcataatatctacagaaacattccaatatctgaaaaagcctaaaaccagacacatttgtgttcccaagcatttaggatattggttattcgacctgtatttagtatctgtaaaagttttccaaaacaacctggaattcctttagaagagatttattgttaattacatgcatgtatgtgtttgcaccagtatgttcacaggtggatggacgcccaaggaggtcagaaaagaccaccagattctctgggatttgagtcatagttgtgagcagcctgatgtgggtgctgggcactgaacccctgtcggtccacaagctccataacctctgagccatgtctgtagcccctagttatactttagagttaaaaataatgtgtacatcataatccaatgtgtgtgtggttattcagagacaaagcaaatgtttcaatttgtacttctaaatcatattgactacatacactcagccaggtgcagccgttcatgcctgtggttccagagcacaggaggctgaggtagagggaacattgtgcatttgaagccagcttgggctacataaggagctccaggccagcctggattacaaagtaagaacttgaacaaaaagcaaggcagtgtcaattatatggcaatgccagcccacttaatttcctgtaccaaattaagtacatgatcaaataattcaaatagttaattcacagctcacaggtgtatctttatgtatcctcataagattaattcaacggctcgaaagtaccatgtgacctcataaaaatggaggtagtttagtgcacctacattttatcataactggaaaatatggttaagcacttgggaactgccagagcaatgagatgaaagcaagagagcaataatttactctaaaaaactaaaaacaaatgaagcaaacaaaacaagacaacccaattcagcaaaaggactgcaagcaagtgcatgagaaacgaaacaggaggtagagatgctcagtggttaggagcactggctgctcttccagaggacctgggttcagttcccagcatccacatggtgactcccagctgtctgtaactccagttccagggtgtccaatgcctctctggtctttgcaccaactaagtgggaacacggtgcacaggcatacatacaggcaaaacagccacacatgaataaataaatttaaaagtctaacactggctgggtgtagtcttacacatctataatcccagcactccgagggtagaagcagggggacaaagaattcatggcagcatgggttacatagtaagtccgaggccagcctggccacacaccaacatcctaatgtctaatactggttcattcacattttaaaaagttggcgagccgggcgttagtggtgcacgcctttaatcccagcactggggtggcagaggcaggtggatctctctgagttcaagaccagcctggtctacaagagctagttccaggacagcctccaaagccacagagaggagaaaagagggacgcttgctgtttctccttctttaaatatgagtctccttgctatgtcacttcctgtctggatcagcacttctctactacatttcatagaatcctctttgactcctagtcccgtctaacttgctatctcattggccaaacagtattttaacaatcaataagataaacatacacagaagtactttccccatcagagaaaccctgcctcaaaaaataaattaattaattaaattaaatttaaaaaaagttggtgactagaagtgaattaagatttgctctactcctaatagatacactggcatacatttttaggttgtattaaaagctttggaatgaagcaaagatggtctgggctgctgtagtgtcacattctaatctgcagagacaaatgcagccatttatgatctggaagcagtcacttctcctcttctgtaaggtgagcactaaagattaaaactcggcctccaaagtaagcagctacacaacagctcccctgaactgtttttgggtttgacaccaaggtacaccacatggcttagggatcaacgtaatcagctcactcagctccaaatttcaacaaaacaaaacaacccagaaacaaaaaccaaacaaaccctagtaccttgcatccagtgtggtcttaagctctgtaaccctctatcccaatgagaggccacacaccccaggagccattataaaacacactaccaccccccacgtcacagcacaggccacacctcagggcagctctggacaggaactgtctgagctggtcatctaggatgaaaagccaacactccttgtcaagtctggacaatttaaaatccattgtaactcgaagggaaaactagctgaccagaaagagtctggtaatcttcaactaaacaaacagaaaagaccatctaaggcatttcttaattctatctaaatgaaaaaagacagttaaatgattcagggaattgtattaatagaaacatcaacaagttacagataaacattttaattgattaaatatattactttgagatctttttgaaatcgcacttgaacggtactaatcaacagccaaaggcgataaaaaagtttagaaccaaaaatgttcagctatgaacaggtgacagagactgctatgtaagtgacatacactgctcccaagaacaatattttagaagataatttatcttaacatgtgcaaggacaaaactgtaatcaaaggctgaaagaaatatatattagtgcctgctttttaaaagtttattttacattttaaatacagtatttttctcattaaaaaaaaatcctaactctgtggtttctatatatacagaagagctgtggggcagcctaatgaatattctggatgtaacagcatagacatttgactacttctggatcaaaattcaaaaaacacagattaagcactggttaggagaaaaaaaatccagtttcttaataaccaaaagagaacagagttaaatacctataaaaccaggcattaaaaacagaaagaaatgcagctgacaagaacctcaaatagtgtgaatgtagtgaactgtgcacactgcagctagccaaggggacccctggtggaagtagtctgtgatgtcaaaactaaacctaagtttttcagtgacaaaacaacacaggcatatattgtctctgtcactatttacctatcccacgcccccctgtatacttaaccacttatacaattagaaacaatgaatgtggatttgttctcctaagaaaatcaaagatgtcccttttcccaccagtaagacacactacagattaaagctgtaacatttaagcatgggcctgtgcatttccaattttctctagtatgtaattccaaactgggatcatggagtctgtgccctaataataaataggaaggaatttggactgtccctggcagtgattttctattagtgcaaaggtactcctcaaatgctgaattacattaaatgattttgcatactttaattcagtaggtgccaatgtgagctcataaaactcctggctgtatgctttttacacaaaagaagttcaatttgagatgtttcacaaagctgtatcaaaaaacccccccaaaaaaaaaaccccaaaaccacctagttttgttagcagtagtgtgaacggtaagtggacgaaaaggcctgagagtctgagggacctgggaggaaggatgctgagctgtcctatgtatctttacgtgtcaattatctactgagtttgaatagtctaagtttaacattctctcagaaaataattctctgtaacataactaactaaatagctatatccaaagcaaaaacaacctggatcactcaggtaagaccaagttgaggccatttctttttctactataatccgtgaagtcttgagtttttaagtttcaaattgttgagcttcagtcaaagctgatgtagaccacaacagcagcattcccaatagcgctgtatctgtgggctctgggagaacacatggagcagacagcaatggactaaccaccagccaggtcgggtcaacgctgggatgtttattttggagactgaatatctagcacgtagctcacgtaactccagtatctactagtggctctgttggtcagcacccaagggctagatgagtcttctgaactgcttttaacctcagagcatcaatgctaaaaagtctcaggaaatcttggttcccagcaagagttcacaaaccatcagaacaaaatcaagaaggtaaacactgactccaatgcgtcatcaaagtcaaaagaaattaatgtcatcttctgtctaaccttagactccaggctctgtaacatcagctttatctagtatagtagactctgtagtagactgacttggacctccacaaggagtaggagttatcaaacttgaggagatacacccccctccctggatactggtggctgccagcatacacttcctcatgacagtcccgccggtacacaggcacaatctcatccagcagaggcttgttggcattctttttggctttctcttcacaagtgacattttctgtgagaaagagggaaaaaatagacaaaagtcaaaggatagatccaggaaaatcaccttactcatcaagcattgaaactgcattctctaagaaactgttaggaattaagtcagtctccaactctgcacgtaggcatgtattagccatttgagtgcctgaccccactatgcacaggtgctgggctctggagtccagtgacagacatcaggtagggtaacaacctgtaccccagtcctttgggttttatcactgttcacatttcccagccttatttttcccacaccatatccatccaattcctaactcccacttacataaaactatcttgctcatgaaacaccaaagataacgctgtgctcatcttttccacaatgaggccaccttcactttagaaacggtggaagggagcctgggcagactgtttctgcatatcttaatataaaatccccagtagagaggcattcagacacagccacaaattcaattatttcaacttaagcctgtttaacacagagatgatacaagtggataaaaaaatcagctctgatcacagactgttactgttaatagttttctctgctataatgataccaagataggggaaagacacttctagaagcttgtaagaatgagataattatgccaaatggtctcagtctaagatattatatataaacaacctcaaggaaaataggtcaagggcatttcaaaatagaagataaaagacttttaggtttataacatggcagagtgaatcctggcaacatctattaattgtatgtcgatggccacagttagaaattttaaaagcatgagaagttctcaaggggaatttaaggaactaggaccaattatgttatgtgacaccttggaatagatcttggaacattagttaaaaaaaaatctgaatacagacaaatttaccaacaccattatcaataatggttcatcaagataaatatattgggggctggagagctggcttagctgttaagaacattagctgttcttccagaggacccggttcaattctcagcaaccacatagtagctcacaagcatctatagtgggatctgattccctcttctggcatgcagacagggcactcatatacattaaatacatgaataaataaacctgaagaaaaaaagatgaatacaatgtacaatttaagaagttcggctgggcgttggtggcacacgcctttagtcccagcactcgggaggcagaggcaggcggatctctgagtttgagaccagcctggtctacagagctagttccaggacagcctccaaagccacagagaaaccctgtctcgaaaaaaaaaaacaaaacaaaacaacaacaaaaaaaaaaaaaaaaaaaaagagttaaacatggtggggctggagagatggctcagaggttaagaacactggctcttccagaggtcctgagttcaattcccagcaaccatatgatggctcacaaccatctgtaatgagatctggtaccctcttctggtctgcagggatatgtgtagacagaacactgtatacataataaataaatctttaaaaaacaacaacaacaaaaaaaacatgtcagtaagtggtggtgcatgcctttaatcccagcactcgggaggcagaggcaggcagatctctgtgagtttgagaccagcctggtctacagaggagttccaggacagccaaaactgttacacagagaaacactgtcttgaagaaaccaaaacaactccccgcccccaaaaaaggtaggagatgagacatcttggctcatgcttcaattctaccacaagggaaactagggcaggcctggtctacacaatgagtttcaggaatgggatacaggtgggtaggcaatggccttttcactttgagacacaagcagagctaaggtcaacggcctcagccatctttaccagttcttttcttttcttcttctttttttttaaagcttaacatttccttatattttaattttttgttttttgagacagggtttctctgtggctttggaggctgtcctggaactagctcttgtagaccaggctggtctcaaactcacagagatccacttgcctctgccttccaggattaaaggcatgcgccaccaatgcccagctctgggtcttctttaagagcgctgtatctttaaaaggttttttatttttggtttttcgagacaggttttctctatatagacctggttgtcatagaactagctctgtagactagtttggtctcaaactcagatatccgcctgcctctacctcttaaaaataacaaaatgccaagccagaggtagtggtgcacattttaatcccagcccttggcaggcagatgccggtggatctctgtttgaggccagtctggtctacatagtgagttctagaacagtcaggacaacatagtgatacctagccttaaaaaaaaaaaaaaaaaaaaaaagacaaagcagcaaatgttttgatatttaccaggtcaaacatggacctttgaagtaattaaggaattgaatcttctgggatgacagtctgtgcgatgtatggaaattccttgttcactatgatggctcacacagaaaatggtacagaacaaacaaaacagactaactagtatgattgttaaactacgtaataaatcactctcaagaaatgcttatggtctaactgttctatatgctcccatatgtgacctcagtggtgtcaaagtgtgtgatgtgattaaagagtgctctattttaattaattaatttttattttatgtgcattggtgttttgcctgcatgtatgtctgtgtgagggtgtgagatcccctgcagttggagttatagacagttgagagctaccatgtggggctgggaattgaaccttgaacttggatcctctgggagagaagccaatgctcttaactgctgagccatctctctccccaagaacaataggtctatttttaaagtcatatggactcatgtccatgccatgcacttccaagaatagttcttaaacctattttaatacaactgtcatgaaacactacagtactcttaacaagaacaaggactacttccgagccacctgacagatgagttagtttgaaagatggaaccaaggtgctcttccactctcacaggctgggccctacagttcctgtgtccatctcaatctggccaacaaggacatgcttacttgtgtaatttccagctaacgaaattaaggagagctgcttcccaaagatcaatgcattggtttaacttgtttcttagaccaaaagaaatttactaaggtctttcaaaactcccgattctgtctactgagatgaaacaaaagtcacattctcgtcaacagtgctttccaaagagaagaatctggtgagttttctttatttacacacaacttctatgcagcatttgggaggcagagcagaggtaaaggtaggaagaccaggagttcaaggctgtccttgactatatagtgaaataaaagccagcattggctatgtgaaaccctgtctcaccccttctcaaaacaaacagaaaaggaaacacaggagaggaaagccagctggggtggctcacgcctatcatctcagcacttgggactaaaatgggaggatactgcctttaaaataaaaacattattatcagaaaaataaattcctttgttaacaagaattcttacttggtctttcaaatgttttcaaaatggggcacggtggcattccactggctactatgaatgctgaggtagaggactggttgagtccaccagttcaagaacagcttgggcaacaacaaagcaagattttgtctcaaaaacaaaatatacaaccacaaatctcaaagtgatttcatgtatttagctcatcaacacaacatcctgaaagtagtaaaataacacacagccaaacagattttcctggcatttagagaaattcatgctcagagccatctttgtgagagactggcctttctcagagcctttccagtcaacattccactactgaacagagtaccctcgtacatgaagtgtttggcagaattacactcatggctactacaaatggacaaaaccctaccttcctcctcctcgtcgtcatcactggactcgctgacatgcacactgacagcagcattcggagagtctgtccattcaaaataaaccccaaacccaatgtcataactgtctgtagcaaattcccagaagaggtatgatccttcttcatgagtggggactcgaactgtgactacttctcctcgtcgtactgtgatcacagagtctgcatcctgccgaatcttttctttaaagtctttgatctgtggtcttgtccacatggatggagctgcgatcactggaagagattctgaagacaacaaggtttacaaaagttgaagagaaaaggttcttacacctgcacaggacacctgtgttctgacaccaagggcaaatagcacagaccaaggatagaggggaacagaaaagcctctctggctattattataagatccaaggtcacagctactcagaggtcatcacagcacaatcttacaagtgatttctcctaacactctgctttcatttcactctatgtgttgagaagtttcgatcttgagcatcctgaagtcctaaagcctttcttttcttttctttctctctctctctctttttttttttttttggtttttcgagacagggtttctctgtgtaactttggagcctatcctggcactcgctctggagaccaggctggcctcagactcacagagatccacctgcctctgcctcccgagcgctgggattaaaggtgtgcgccaccaacgcccggccctaaggcctttctgtaaagagctaagagaaacagaaaaccctcaacactcttagaaccacgtgggagggacgaatgtcacgtgcagtgctgcactcagtaagatttactaacacaaagatgcccttccatctgtgaacagtggtagggttggcactcacggatccctgggtccaataactagcactacacaaactaggatgtggagttcaaagtcatctttagcatggggagcttaaggctaaccctgagttgtcccaaaacaaaacaacagttgtggaagagcacgtctttaatcccagcacccactctgcggcagaggcagacagacctctgtgagttggagaccagccaacagtgaaatcctgtctcaaataaaaaacaaaacaaaacaaaatccaatgagatgcctcagcaggtaaaggcacttgccaccaagcttggtaacttgagtttattcatcagaatccacacactagagggagagaacaaagttttgcaagttgttttctgacctctttgtgtgcacacatatatagaataaataaacaaatgtgaaacaaacagtggcataaagccttttttttccccctccaactttttttatttgaattagaaacaggattgttttacatgacaatcccagttcccttctcccacccatcctcccctaacccccctaactacaaccctatctatcacatatcttttctgctccccctggatggtgaggccttccatagggtgtcatcagagtctttcgtatcctttgggatagggcctaggcccagccctgtgtgtctaggctcaggtggtattcctctatatggaatgggctcccaaagtccacacctatgctagggataagtactgggcttttacaggaggtcccatagggcataaagtcttggtaagaccaaagaaggtcttttctgaagctatttctctgttacttgctctaaaaagtcaaggaagagcagaatgggtttctgcaatcttcctcggctaagtattcttagatccactgctgcactaagaggatgaggtaaaagaaacaaaataacaacaacaaaaaccccattgaacctcccccatcctcaactgcctaaaattaaaattagggaaattatacttcaaataaacaaacggtcacagaagattcacaaaactagaagctgtaatgggtgactctggcagatgtctacatttctgccaggacagataacgggcatgcagcaccacacccagtttaatgtgctgcttcaagcggaacccagggctttgtgaatgtcaaacaactaaccctatccccagccccaatcttctacgtctacgtcacagaagcaccagactcagattcaaagagaaaaggtgttggactctcacacactgtaagtgcttcagaacccagtcagctggccttcctggtttctctttttcatgaggtctagagaatgacatctggaaggacaaacagatatgctaaactataccttttggtccattttccaaggcttcttctgccacttctggctcaatttcttgttcggaattgacagtgtgggttctggcctgtccattaactgacatcacgtcacttgccccagctgcattcacttttgatgatgtaggcaatgaagccccagtcacggctacttcttgttgcttctgtaatgctgcctacaaattgaaaagaagttaagatcctctcctcagaaaggctaatactgcccaggagtgacgtacaacaccatgcattcgctctacaataaagcatgctaagaaactactaatcaactttgctaacagcgtttctctgtgtagctttggagcctatcctggcactcgctctggagaccaggctggccttgaactcacagagatctgcctgcctctgcctcccgagtactgggattaaaggcgtgcgccaccaatgcccggctcaactttgctagttttttttttatcatatctgtaataattattaaatataataccagctgacatgattaaactatcaatctcagataaaattactacagacaaagtacagtaacatgctgctgcctcctaagtattaagactaagggcatacaccaccatgcccagctgtgatatattttcttaaaactgagtagaagaaagtatttttggtcttttgttgtttttaaataaaattcaactatatacagggcataatggcaccatgcccaggtgtgatacatattcttaaaactgagtagaagaaagtgtgtttttgttatttttaaataaaattcaactatatacagggcataatggcacacacgattcatcccagcactcaggagacagagtcaggcagatctcagctagcctagtctcaaatgccaggccaaccaggaataacactgaaaccctttcaaactataaaactgggtatgttaagtatgcctgcacttagcacggcactcagaggctgaagtaaaaaacaacaacaaaaccccaaccactttactctccccatactcaggtttaactgctgaaaatttaaattaggaaaattatacctcaaagaaacaaatggccacagaagattcacaaaaacagaagctgtaattggtgaataccacaaatatctaaagtaacaaacccaaccctcatatatagacaaactattctaatatggacagaaataaatattcaatgaaagattatgatcacaacttattattatattttttttttgaaattttggttttaggatgttagagaccaaacccagagcccaatgttagcctcagcaggtgttcatacaccgaatcacacccctcaggctctaagatatagtaaaactgtttaaaaatctaagggttataataataaagttagagatccaagtatttcctcacttaacattttatactgggctgggtacagtggtacacacctacaatcctatcgagaaggaggctgaggcagcagaaccttgagtttgaagctagactgatttatatatcaaggcaggaaaagagaatgtacatagaaaagaagtttgctagtcctactggcatgggccactaactccagatactcaaaaagctgaggcaggaagactgaaagttcaagaacaggctgagatactgaatgaattctatgccaaccagagcaacttaatgagatcttgtctcaaagtttaaaaagagggctgagaatatagctctcattggtacagccttgcctagctcccaggtctttaaactgtgttgcaaacccatacagaggtcacataactgaacgtgggaggggggtcacaaaaaatctggcaacagtaaaggtttctgaatgcacaaggactacaaactcattcaaaatcaaagtataataaatctgaggtgtttccaacagtgctcaacccctacatcaatgcaacttccacacagtcttggttctaaacacacaacacatacactttgctgtcatgacatacaataccaatgaaagttgcctgatacaccttggctcaaactcaagattattttatgttataaactgcagtgtttttatagcacaaagttttctgtacttaaataaaattgcttatttatggaaaacagagacatagtattttcctgtcattcctcagcttcaaactatctaactagtatatatttaaattataagagttggagagatggttaagtggctaatagcactaactaaaagacccaggttcagttcccagaattcacatggtggcttaccaccacccatgacttagttccagggttctgatgacctcttctggcctatgcagaaccaggtatgtatacatgcatagacatacagtcaggtaaaacactcacacataaaataagtaagtcttccagaaaaaaaaaaaatttcctgagggctggcaagttagttttgccaacttgatacaatctaaaatctgctaggaagaaagtctcaatgaaacactgtttatactgggttggccccatggaaatgtttgtgaaaggctgatgtggcccagcccattgtgggcagcactactcccttcacaggggatttttttttttttttttttttttggtttttcagggcagggtttctctaagtagctttggagcctattctggcactcactctggagaccagactggcctcgaactcacagagatccgcctgcctctgcctcccgagtgctgggattaaaggccaccaacgcccggagacaggggatcttgaacagtgttaagcagaaaaatccagctaaagcaacatcttttttgtttgcttgctttttgaaagattaatttattgttttatatatatggtgctctacctgcatgtacacctgcacaccagaagagggcatcagatctcattatagatggctgtgagccaccatgtggttgctgagaattgaactcaagaccttggcaagagctaccaaagcccttaactgctgagccatctctccagccctgaaagcaactcctatgcattcattgctctctgctcttgacggtggaagtgatgtgaccagctgtcttacactctggccactgtgactttcccaaattgatgaactgtaacctggaagaaactcctcctctcctcaattaaatcttataagggtgttttatcacaacaacagaaatgaatccagggtaacaaataagggtgctcaatgccaagctggccgacctaagtttgatctctgggacccacacgatgggaggagaaaactggctccagcaggttcttctctgatgtctacatgcataccatggtaaaggtgactctctcctttatatacacaggtaaagaaagaaacacatttttaaaatgtgtcctgaatcaacatgggagagttagctgggtgtggtggcactcgcctttagtctcagcattcaggaggcagaggcaggtgcacctctgagcttgaggccagccatgtccttaaattgagttctaggacagctaaggctacacaagagaatccctgtctcaaaaaaaaaaaaaaaaaagggagttgaaaatatgtttaatctaaaggatacctatttggggatacttccaaatcaatatgggagcagctatcaatgctactttaaaatctattgagtcggcccagcatggtggtgtacattttaaatcccagcactcagaaggcagagtaggaggatctctgagttccaggccaatttggtctatagggcaagttccaggagagctggggctacaccgagaaaccctgtctcgccacctggtctaggggctggaaactacaaaatcagtacatgtgcttatccagtgagcctttctctaacccttattaacttttggaggaacttaaaaagtgaatcataatatcacgcagaaagctgtgcaaacgccgtgcctgccaagcatgtgtacagccctgtactcatccccaccactaatcccacaactcgagaggtatggagcctggaaaagatggtcagtgtcagtcttggctgcatagtaaatttgaggcaagcctaggctacatgagactcaatttcaattagaagtgtgcaaatcatatattacatagcttaatcaattttcctatctcaaaaatattcatgtaaccatcacccagaataagaattttttttggtgggggtttgaaacaggatttctttgtattgctttggaggttgtcctggcactcgctctgtagaccaggctggcctcgaactcatagagatccacctgcctctgcctcctgagtgctgggattcaggcgtgagccaccaacacctggccagaataagaaattatttatatcccagaatcctctctagttctttcctctagacaccttctcctacagtatttccagacttaataactatagatatgctttgcctacttttaaaccatatataaatcattgtgtaatatatgctttaagaaaaaaaagtgtgccctttcctttaaaataaaaaaagacagacagcctttaatcccacaacttgggacacagaggcaggtggatctctgtgggtttgaggccagcctgatctacaaagcaagttccaggacaggctccaaagctacacagagaaactctgtcttgactcccccccccaaaaaaaagagctgggcagtgctgacttatacctttaatctcaagaggcaaacaggcagatctctgttgagtttaaggccagcctggtctaaagagtgagttccagaacagccagggctacacagagaaaccctgtcttaaaaaacaaaacaaacaaaacttttaaaaagtaaaacagctgaccatattattttcatttttcacaatataagtgagagctgcactttttttaatcctatgtctcccctccaaaactatcctctgttaggaagggggaagctttccttgacatgcagctagaaaacactcaggctcagcactgtaatctcctactgaaacaaaacaagaaatacaaaactgatacagagcctttctgctcttatctgtctggccgagtcgtgccaggccaaatgggcaccatcacagggcgagcaggaggtctcatcattggagggcccgcatcatgagcgtgtgaccacccatgggtggcctcattccgggagcaggtcccacaggcattatcccaggaggaggggggcccatcatcggcatcatgggagggcctcccatgtggggtgcaggcatcatgccagggggaggaggaccagggagactgaggggaggctggatcatggcccccggcaggaggaggagcagagaatggagctgaagggatcttttcttgaacaaactttaaaaaaaatgattaaataaagagtctcactatgtaggccttggctggcctgaaaatcagagagagacctaccagcctctgcctctgcctctgcagtgctgagtttaaagacatgcaccacccaccatgggtgtattttgtttttaatgctatgggatattgcactgtgaaaatataaatttacccatacaactattgattggcatttgggaatgtatgtggggagcagatgaagtcctgaatgactgtggggctgactctgctgtgtgtaataaatgcaggtaacagcataagttactttttaaacacttggcctttacattactcttttaacaaaaaacattaaatcttaagtaagtatatgtttacaggattaccaagagagacatgtatgctggcctatttgtacatgtaaaaatcatttctacaggaaaaaacatttctctctgctgctatataaaacaccgtaatttttgtgtggttgtttttcaagacagagtctctctatgtatccctggctgtcttggaactagctctgtagatcaggttagtctcaaactcatggatatctacctgcctctgcctcctgagtgctgggattaaaggtatgtgacaccatcacccagccaaaacgtaatattttaaaatatactctaaagcttagattctaaatcacttccaagataaaaaaaataaataaaataaaataaaaaaataaaaaaataaaaagcaccagctaccagaaatatacatacaaccaaaacaagtcagtacattgaaaacattacatgatggtggaggaggataaggcatttgtggagctaatcatatcttgaaactctacagtaaaaccaattaactccccttctctggatcccctgcccaagacttttatctaatagatacagcaggctgcaattatttacatagctctcttttttaaaaataaatatgctttgggagaagttttaaaaagcacagaggagctgggtatagttgtgcatgctttgtagtcccagcacctgggaggcagggtttgagtctcagcctcagctacacaagaccctgccttacaaacaaagcagaaaggtacagaacagacacagagcagacaccaacatagcaggccatcaaaagttcatactttagaggagttaacttcttccttccttttacgtaaaaatcattagtaactgttaaaaaaagaacttgagtggtaatgaaaccgtaaggctgaattctcaggtagcctactgtgcctatctattcccagaagcaaccaattagaattctaactgagacgtctaatttcacttcttggatttatcctaccagaaagacttcctcataaagtgacagtggcctatgaacaagacagtatataacagcaatcttatctcactgcctactgacctccccacaaaaagggaggggagatagaaagtagaaacagattacagaagagggagaaacatctcttaaaaacggtgcttattaaactgtagttcagaatctttctgaccctctcatgggttatataaaacctttagggccttttaacatctcaccgatttctaaaactaggggagagaggttatttcatttaaaaatattctactgtcctaaaaaatatttactattatataatgaataatgtgtatatgatgattttgtctgtaaaaaagtgtcatagcccaatatggtaagaatttataaatcaattaatttagcttctaaccctccccacacaactctcttcctcttccacttggggatagggtccttctaaagctgcccaggctagtctgaactctcagccacctgggtagtattacaggtttataccaccaggcctagctattatcttcttttcctttcataatcctgtgaggtcaggaaccttgatcttgtgttttattctcacagaacttgagaaaaagcaggaaatcagagcaacagtaacatgtcagaaaatcaaatgataatggcagcgtcaggacagaatccaagcaccacttctttcacttaaatcgccttccatatttctggttgtgaacctggcctttaacagctgagccatctctctagcccaaactatctcaatgttgatgcaaatacttaggaatagagaaggagtgcatgctgtcctgagttacaatggatccggcccagctctgagaaccagcctatggccttatgggagggaagtccagctctgagaaccagcctacggccttggggggtggtaagggggggggtgatccagtctcttaaagctttctgacccaggccctgcatgctccgcctgaagggtgctcatatactaaggctgtttaccagtcctcagttccaggggcactaccacacacagtccacaccagacttactgttagcacactagacctgcaccattcccatacaacaatataaacataaaaacccaaaacaatataaaagcacacctctgaagttcaagaatctgtatttttctcttgtaactgccagtatagtgctaaatagactgcttaaaagatcaactaaaaagttactttataccttagaggctagctaatgcaaaattcatttacaactgttaggaaggaatgtgggttccatggaaacacaacacctttgctaaagccgccaccatacctgctgctgtgcgagctgcacttggtacagctgctgcatgtactgctgatagtgctgctcctgcagctggcggatgagcatctgctgctgctcgcggttccccgggtactgctgggccgcgtactgctggaactgcacggcagtctgcgagtttaaagctgccattatctgctgcctaaaaacattaataaacacatgccagtctgacgacaggagactgttcataacaaaataaaatgtcctgttcattcttacagtttataacttaaagtttaacaaaaagcatgtgctccaggcccagaatatttaaggaaaaaatggacctctaacttttttactcaggcttttcaagaaaaactgaaatggagactaccaggcacatcaccgccatcaacaccgtcactgacacttcctgtgctcttctgatctgacccgcagctcaaagcatgtacacctaccaacccacttggtgcttcacaacactacgaggtggtttagcaactgctcaagatttgactgcagccagattatttgggagctaggactcaaatctagctagtctggctccagagacagaatcccatttgggcacggatggctgtttgactttggctatggtttctctacctaaacagcccagaacagcaccagggagaagaacaggtaattgatgttacaggctctgttaaggatgaataaaacagccaggcggcggtggcacacacctttagtcccagcactcgggaggcagaggcaggtggatctatgtgagttcgggaccagcctggtctacaagagcgagttccaggacagcctccaaagacacagagaaaccctgtctcaaaaaaacagaaagatgatgaataaaacaatcaacaacgcaacagtgtgtagcatttgacttaaaggtgcctttattaagcagcactgaagaaaacaacagcagagcctgctgcttggtttagtgatctctcccttcctccctgtctccaaggggttacactgtacagagtccaggctggcctgcactcaggctctgaagtgctaggatcacagatgttcactgctgcaccttgtatggagacaccaatttctacagaattattacaactctctctcttgtctctcagagacaactacatgtttcataactgtatgtgaccacttaccaaagacttcaggtactgactaaagcatgacactgggcccaccaaatccaaaagagaatggcattaaaaacctctctccaaagtagaacaaggctttgaatcactttaaggctagctgagaaactagctagaaacaatgaggagacctcaatgtacctcaattctctggtttaacttttctgccaagctatccctgggtccccaggccttttcccctgtgtttacctctttgtatctacaactgtcctttaaaagccaggcctttctaagacagctacctttaacctttattgaataaagaagtttcagctcctaggttctgtactggggctggaatggctatctgatatacacgggttagctaggttctaagtcctcagaattataagtgggcctcagactcgaaccagcctctcagatacacaaaaaaaatagatgacaaaattcccaggtaagacagctttataaagacaaagaacagaaactagatagcagtgagaatgaagagagagactaagaagacaagagatggtgagaacttagacacaggactcaagagagagcaactgagaaacctcaactgctgcttctagtctctcggttttacaagctagccccaaatttcttcaacacattattctttgataaaaaacaaaagccactgttaaaaatgaaaggagctgacatgatggcctcccgggcaggcgcacagccacagctcacttttgctgctccagccgaagcctctcctcttctattcgcctccgctcctcttcctcccttctcagccgctcctcctcctcacgcttccgcgtctcttcttccttttgcaggcgctctcgctcttcctcttcacgctgccttcgctcctcctccgccttcctacaaggtacagagtaaagagaatcaactctgcacggtcatcttatttttaaatcatttaattttcacttctcagtgaaaagtaagacaaaacccttttctgagaacagcaatctgtcaaaagttcaaacacataaacttccatatagtaaaacttaatatggagtcaatctcacaacatatatgaatgcatcaagattaatcatttcatgggtgctttcatagtcttcatgacaaaagtaagcaagaatcaaacaggcctcctgaaacagagaagcttctgtaaggcaaaggacacagtcaacaaaatggcagcccacagactgggaaaagatcttcaccaaccccacatctgacagagggctgatcgccaaaatatacaaagaactcaagaagctagtctccaaaacaccaaacaacccaattaaaaagtggggtacagaactaaatagagaattctcaatagaggaatctaaaatggctgaaagacacataagaaagtgttcaacatccttagccatcagggaaatgcaaatcaaaacaactctgagataccatcttactcctgtcagaatggctaaaatcaaaaacaccaatggcagtttatgctggagaggatgtggagaaaggggaacactcctccactgctggtgggagtgccaacttgtacagccactttggaaatcagtgtggcgattcctcaagaaaatgggaatcagtctaccacaagatccagcaattccactcttaggcatatacccaaaagaagcacattcatacaacaaggacatctgttcaaccatgttcacagcaacattaattgtaacagctagaacctggaagcaacctagatgcccctcaactgaagaatggatgaagaaaatgtggtacatttacacaatggagtactactcagcacaaaaaaaaaaaaaaaaaaaaagggaatcttgaaattcacaggcaaatggatggaactagaagaaaccattctgagtgaggtaacccagtcacaaaaagacaaacatggtatgtactcactcatatatggattttagatctagagcaatgaagtaccagcctacaatccacaacgccagagaagataggaaaccaggaggaccctaagagagacatacacggtcccccggagaatgggaaagggacaagatctcctaagctaactgggaacatgggggaggggagagggagttaggagaaagagaagaggagaagaggaggggagaggaggacatgagggagcaggaagatctagtcaggagaagaatagaggagagcaagaaaagagataccatcatagagggagccattatagcttaaagagaaatctggcactagggaaaggtccagagatctacaaggatgaccccaactaacaatctaagcaatagtcaagaggctaccttaaatgcctttctccgatatcgagattgatgactaccttatatgccgtcctagagccttcatctagtagctgatggaagcagaagcagagaaccacagctaaacactgagctgaactctggaatccagttgcagagagggagaagcgatgagcaaaggggtcaagaccaggctggagagacccacagaaacagctgacctgaacaaggggttgctcatggaccctagactgatagctgggaaaccagcacaggactgttccagaccccctgaatgagaaggtcagtttggatgactggacaatctatatccccccccaatggaaggcctcccccctccctggggagcaaaagggggatgggatagggggttggttggtggggatgaggggagggagagggaactgagattgacatgtacaagaagcttgtttctaatttaaaattataaaaagaatcaaaacaggcaactttcaaagacattacatctgattcaacaatgtactataatagacaaatcaactttctatgttatttcattttcattaaatatcaagtcttcacctggcatggtggctcttggcactgaggaggcagaggcagaaagatctcttgagttctaagctaatcagagatacaaagtaaaaccctctctttaaaaagggattgggccatggtgcctttaatcccagcacttggaaggcagggaaaggctctctctgaatttgagcccagcctggtctacagagtaagttctaatacaaccaaggctacacacagttcagaaacctgattagaaaaaaagaaaaactaaacaataaaaagggatggggtggggcgggctagagagacggctctgcagttaagagcacactctgctgtttaagagatcagaattggggtcccagcacccacacatctagctcccaaggatctgatgtccttttctgtcttctgagagcacctgtactcaggtgtacacaccctcacatacatacacataactaaacctaagaataagtctttaaaagagacacaaattgggggctggagagatggctcagtgactaagagcattggctgctcttccagaggatcagagttcaattcccagcaaccatatgttggctcacaaccgtcccaggtgttccaatgctgttttctggcttctgaggatgttgcacacacaaaaacaatacaggcaaaatacatacacataaattaaaacaaacaaaacaaaaaactcccgaaactcagatattttcattggggtacaaaacatcttactttggttacttatctaagaaatgtaatttatgcctttaatcccagcactcaggaggcagaggcaggtggatctctgtgagtttgaggccagcctggtctacagatcaaattctaggacagccaggactacatagaaaaaccctgtctcgaaaagaaaagaaaaaaaaagaaaaaagaaattatgtccctgggtttgtttgtttgttgtttcaggcaaggtatgtcaccatgtggccctggctggcctagaacctgctctgcagaccagactggtcttgaattttgagtaatcttctgcctctgtcttccaaataccagacttatggggcatgtcatgaagcaaagcactttcataattctctaattttcaggctatttttctcctaaatttttagtttaatttttactttatgtatatggttactttgcttatatgtatatctgtgagtgacttgtgtgcctggcattcatggaagccaggagagagtggaactggagttacagatggctgtgagtctcctctacgtgagtgctgggaactgaaccaggaatctggaagagcagtcagtgctcttaaccactgaaccatctctccagtccccgaaatagttatttctatcccaggatgagtaggaaatcatagtcccaactgtttctaaagcctatcaatccaaggaacatcagtgttaatctttactgtactgatttcattaccaaggatatttagacggtcaaagttgctgaaaaacaaaaaaacaaaaaaccaaaacctccaaataatggaggcggaaggttagggcacaggtggggtggtgcacaagtaagttgtgtgccatcacactaaaccaaggtgtaattcataacaagaacagagaatatcagaaacataatagcgtgagctcagcagcatctactccaaatgctggaaatcattaataagccatctaggatccaaagccaacacatacgtctgtgtaagccctccatgcagcatagctaaaaagcatgaaatagaataggaacactccagaagtcagaaacaaatgatatgtcagaccagaaaaaaaaaaaaggaggaaggagcggatgactctactgttgagcttgctgtggtaagacaaaggtagccaggggtggcagtacacaggtgtagtcccagcactcaggaggccagcctgggctacacagcaagactctgcctcaatgggcaaaaaaaaaaaaaggatgctgctgtagatggaaggctcatttcaagggcgtaaccagaggaagcagccttccttccaaacttatatgaaaacctactcgtgtcaggagctctgaaaaactgccacaggatcaaaagtgagggacaaagagagagccctgatctagaacaaacactccacaaagcaagaccacagtgcacagtggtcccactggcacgccctgtgacatcaccttcttttttcttcttcttccttctctattctgtgggaagcaacatatgctgaaaggaggggacagcaccggttcagaagcttcacgaactccaccatggcgtcctctttggacatgtttcccagggctgcccattctctcctgccgagagtacaaacaacagttaccttccctcagcaaaatgacaattttatttaattaaacctacatgaaaaatactcagttacaattaaaatgaaggatgcttttactagaagcaaaaaattcagaatgttaagtttcaacaaatctatattgatatattaaataagatgccataaacaatccaaaatataagtacattttgattattcacacttgtcaaaaagcaatctatattttattttctttatataggttgaactgaacaaaaaatactccattgtctggcacaatcatgtatgtctcaataagggaatcaatagtatgtattttattctttatttagttttatgttgatggttacatgtttgcctgtgcaccactcatagcctggtgcccttagagcacagaagagggcctcagatactctgaaactggaattatagatggtgtgattcgtaacagctgagccaccctccagttccagtagtctgtgttttaaatagctgtttttagtattatttaggaagaagtcagatgacatcgtacttgtcctatgttcataacaagataagtaaacttcttccactatgagcaaaatgaatgtttacttgctatgccaagagttaactatttataccataaacaattcacattatccctctttctaacatcattgttaaatttactaaataagaaaacacttgttggccaggcgttggtggtgcacacctttcatcccagcacttgggaagcagaggcaggtggatctcggtgagtttagggccatcatggtctacagagtgagttccaggacagtgagggctgttacacagagaaaccctgtctggaaaaaccaaaagaaagagagaggggggggtagggaggggggggggggagggaggggggagggagggaaaaagaaaacacttgttacctcctatcattccccaacacatcaaagaatccaacttcagggcatgtgtctgggttgtatgggcccaagagaacctgcttatgcagtgccacaaacttcagtttttcttcataagttgggtgaaaagctttgccatcttttactgaaagagaagaaatttaaagaaaataattggtattggcaaaatacacacttttcagtagctaagtgcagtgatacctcgtttgtttacactctaacaaataaagcttgctgaagatggggggtggagctagctactatagaggtctgtacagacagacaggaagtgatatatatatatatatatatatatatatatatatatatatatatgactggcaaagagagaagtgataaggcgggaagagacaggagctcggtctctttttggctgggatgttagcgaggtaaaggtagctgtagcttgctcctttgtctccctgatcttttagcatttcccctatatctgactctaggccttcattagtcagaacctaaaatagaaatcctttatagaagattttcctcttcttcctccccacccccattccttttttcccctttaagtcgggtcttactaatatagcctagggtggtttctagctctttatgcaacccaggcaggcctcaaactcagtccttctgattcacccctaaataccgggattgcaggcatgtgctgctgtaggggacagtaagccatgcctgttagaggctggctacaggtgtgcctgaccacgcctgtcaaggcatggtcaaggtgaggtcaggatggcgcagcatgggctcttaaggggccgcagagtgcattgaatccccttcttctcctgccctttctctctggcctcactgctcggctgcccctggcaagctctggcttgcgtttggctggtattttatctcaataaagatatctcgaccttacggattacggattgtctcttgggtcacaaaatatgctgccacatagagccttatttttttgttgaacaactaccattatttatgttaaagttaccatagagaaacacatctgtcaaactgcatacaggcatgtaaacagtatgatttgagcatttagacatacattaaaaaaacatacagtaataatctttaaatggttctcccccagacagagtttttctgtgtagcttttgctgtcctgaaactcattctgagtgctgagatttaaaggcatgagccatcaccacctgatttaaattttttttttaaagatttatttattatgtatacagtattcttcctgcaggccagaagagggcaccaatctcattatagatggttgtgagtcaccatgtgattgctgggaattgaatttagggcctctgaaagagcagttactactcttaacctctaagccatctctccagcgcctaaatgcttatttttattgttgttgtttctatatctgtgagctagggtttcactgtgtagcactggctggtctaaaactcactatgtagaaccaagatggctagaaactcaagcgacagaggcaggtggatctctttgagttcaaggccagcctggtctatagagcgagttctaggacaggttccaaagctcacagaaaaaccctgtctcgaaaggccaaaaacactatacaaacactgcatcaatcctaaaccctctcccatacacaaacacacactgcacacagtctttgagacctctgaagtgaatggatgcaaatcagaagacctcagagacctcattcattactgcaggaagacatcgggacagacacagtgttcagagatgcctctggagaaggcactgataaaactggaagggcaacgtgacaaaaactgcccccttatgtgactcaatttttttctaacaatagtaaaattacgcaatatttgaaacaaatattaattctagtatttctgtgcatgtgtgttctttccttctgtctttatgtagatctaggtatggaactcaggtctcttaagcatgcaaagcaagaacttctacccaagccatggagccatttcaatgagctccccccacagcttttaaagatggaaaatagaaaacatgttgtgtgcatacatgtatgtgcgtgtgagtgcaggtgcctgtggaggccagaggcattggatgccccaggagctggagtgacaagcagctgtgagctgcccactctttgtggtcctctgcattctacactcttaatcactgagccatctttaacacacacgcacacccaaatactttttgaaagacagactatggggtcagggagagggctcagtggttaagaccatgtgcaactcttccaaaggatctgggttcagttcccagcatccaccacccagctcataaccacctgtaactccaattccaagggatctagcgccctcttccagactctgagggcaactcttacaatgttactttaattagtgatgctcattactaagatatgtgtgtgtccatgtacatgtttctgtgtgcatgggagtcctaacatgtacacatacacatacacacacacacacacacacacacacacacacacacacacacacacacacacgtctgttaatgttcagggctttcctctatcactctctaccttattttggggtgtgggggtggggaatagtgtcgctgaacctgaaactcacagatttgtctagactggtaggtagggccagcaagccccaaggagcctccagtcttggccttctcagtactggaattgtgggcacacggccatgtccatcttttacatggatgctagaatctgaactcaggtactcatgcttacttggcaaacactttttacaaacatagctacccttcaaccctataaagacttttttaatatttgctcaacttaataatcagagctcctgcacacaaatcaccatgctatatgccagcaatgtatttttcttagagattacaaagcattgaggttcaattaaagactgaaatttgtctaatattcaggaaagaagatcaggagttcactgctatctttggctagcctggactaactgaaatcccctatcaaaggaacaaaacaaagcaaaataaataaaaacctgtaaactgtaaactgggattaagcccttaatcccagtacttgggagccagaggcaggcagatctctgagttcaacctggtctataaagcaagttccaggactggctgtatatgtatctaggggctatatatatgtatctaaagtatatacttgtgcctaaagacaatataatcccagcactcagaaggtagaggcaggagaatctctgtgagttcaaagctagcctggtttaaagagcgagatccaggacagcctccaaagcaatacagagaaaccctgtctcgaaaacgcccccccccaaaaaaaattgtctgaggctagtccacctgagtgcagagaagacataattatacgttactaatcaataagttatagttgtccattattttaaaacattaaggcatttgcttattttttaatgagttacttcttttcagacagggcctcactcactacgtatctctggctagcctggaacttgctataagtgttgggattaaaggcatacacctccatgaccagctaaattatgtttaaagaagtcaggaaatagaactatttcatccatccatgagaccgatatcattaattctctgcttgtatataatactatccatactatacatgggcataatcagtagcaatgttagtgtaaccttagctacagagcgagaacctgtcttaaaacaaaacaaattttagctgggtgtggcagcacatgcttttaattctagagcttgggaggcaaaagtaggcaaatttctgagtttgaagccagcctggcctacaaagggagttccaagacagccagagctacctagagataccctgtctgaaaaaaaaaaaaaaaaaaaagcaaaagaaaacaaaacatgtttttatatatgtttatttgtgtgtgtatgtggggggggggagtcagaagatagcctgtggaagttggatcctttcttctatggtgtgttcaggtaacagaactcaggtcatcatgtttgacagcagcacctttgtccactgagcaaacagaaacataaatcaaaaattcagagagttctcacactttttttcttaattaaaaaaaaattataattttgccaggggtagcactggagaggcacaggcaagtggatctctgtgaattgaggccagcctgatctacatatagagttccagtacagctaagaactccgtaatagagatcttatctcagaaacaaataaaaataaagatttattgtgtattagtgtttgtctgcatgtatgtatgtatgtgtaccacattagtgccttacacccaacgacagtcaaaaagggtactctatctcctggaactggagttaggtggttgtgagctactatgtgggtactgggaaccaaacccaggtcctcttcaagagcaacaagtgctcttaactactgagccatctctccagccccgctcacacttacttcttttagtacatgtaaaacgtccctaaaggtgattgtgctttaaaagccaacttaggggcttccagggaactcaagtttggttctcagcatctacactgcagctcacaaacatctgcaactccagtttcaggggatctgatgccttcttctgacctctgcagaaaaagacaccaatcagtagacacacacacacacacacacacacacacacacacacacacacacacacacacacaagtaaatctaaaacaaaaccaattggatctttccactagttcttagtattttcacgacaaacgtattcaagtgataaaataactagatagtacttttgaattattttcctcagtgtattttatgagaaagcaggagtcctatctattttcacctcctgcagtggaagaactgtctaaagccagactgagattcaaccttgcttcttattaggaatgactgagtagcctgggccaggtcccttagctaagaagtacagataacaaggaagtctcatgggaggattagataaataatgtgtaggtaactttcacctgaaatctggtaaacatgtgcactgtaactactggcagccattagtgtgaaatcataaattaatgcaaccaacacactaatataatacagccatcaaaatacgaggaaaaatctagcccctgaataactcaacaaaaacaaacaaaaaaatttccccaagttaaagtcatcccagaagcatacataaagctttggaattctttaggaccttaacataaaaagctaagaaaggccagcttaatcttgctcaaatagaattaagagcaatttactctgaaaaaccttcactggttcttcatctaaaaaaaggttaaactgtttacaacttcattgtgcccttccaggatctgaatcatctttctcctctcctatttgccatgtcccaaacacccatgcctggccctaccaatctccactgtcccttctggaatggccctgtttcctccacctgtgctacagtggccaactagccctttaagtcttctttctgacttcatgctctgtaagaacaaaggtgactgtatcattcacacagcagtgattctaatatcaaaccttacccataagggcacagaaatccctggcatttacatagtaaaaccctcacatacagatcatcacaagagacattttcatctattatgtacacaccccatcccctggggtagaactcagggtcttgctatggatgctatgttacaaatgctgagcaagcacttcttcacagttacaaccccagcccacatcatttcaatttcactttatcaaaaaattgagatattgacatggtaagctcatcactggcttgattattactatgacaagtatggaacacaaaacagacatccagattccaggttatactattaccatttttgttctttctttctccttttgtttttgtttttgttttttttagacagagtttctctgtatagctttggagcctgtcctggcactccctctgtaggcttttttttttaattaattttttttgtgtgggggtgtatcttacatctattccagagtgatcttgctctcactatgcagctaagaatgaccttaaacttcagatccacctcctgagtgctgttagtacaggctgcaccaccacaccttgcttatatggtactggttttggaacccaggtcctaaagctagataggcaggcattctacctactgagctacacccgggccctcctagctattttcaatagaagataattttgctttcaagattcacatttagtccatagaagataaaatgtaatttaaaagaaaaaagagagctgggtggttgtggcacacacctttaatcacaacactcagaaggtagaggccagcctggtctacatactgagttccaggacagacagagctgttacagagaaaccctatctcaaaaacaaacaaacaaaaatgtaaaacactggtccacaacaactgcaatacttataaatacacggacttattttgctaggagaaaaacatacattaaaatgaaggcctgagttgggggagatggctcagtgggtagggcacaaatatgaattcagatctcctaaatccacatcaacaaagatgtagtgagcatctaccattcagttctcctatagtgagaggctggcaagggaatctgcagaagcccacgggtagctaactgctatgcacagcagcaaaggagaacctggctcaaggaggactaacacccaaggctgtcctatgacctccacacacagaggtatgcatacacacacacacacacacacacacacacacacacacacacacaccagaaaacaaaggcagcattgctggactcaccccagtttctgttaattctgcttttatatccttttccctcttccacaattagggcctgatataccgccagccctgcactgttacctcaaataataacccacagaaaagtgctttgaatcgctaagtagctatttgaagtgcttagataccatttgagcacttaatttaggaaatgaccaactatcctatcagtgtactttcttctataaggtgactggtaacttaggcccctcaaatatggattgcctgtggacccttgtcactcaaaaggcaatttaaaataatctgtttccaccactaaatctttaacatgaggcatctagtgttacctaatccagcttcttctttatatggaacttgattctagcaaagtgagtgttctaggaatttatatagcaacaatagtttaagttgagattcctgacccaaaacaatacaaatttgctgcccattatacaatttttggtttgtttgttttttgagacaaggtttctctgtgtagctttggaggctatcctggaactcgctgaaattcacagagatccatctgcctctccctcccaagtgctgggattaaaggcatgtgccaccaacacccggcttatacaatttttaaaaataactattttgtttattttttttgtttttgaaacaggctctcactatgtagctctggctgtcccagaggtcattaggcagactaggctgacttcagattaacagacatccacctgcctctgcctcctaaattctgagattacaggtgtttaaaccatgctcagcattttaatctcttgaagcagataatgctcaggtgaaatgacccatctttttgttacccatgcagcaaaatcaaggattagaagttggttctttctgggtctggagccctatttcagtggttaagaatggcacagtgctcttcccaaggacccccattcaattcccagcacccaagtctgtctgtctgtctctctcacacacaaacacaaattaaaagctaaaagaaaaactaaagttggttctttctttcagtttatgttattgaaaagcaagttccaaaaattaacttttgttttgagacagggtttttctgtgtagccatagctgtagaccaggttggctttgaactcagagatctacctacctctggctctggggcgctgggattaaaaggtgttcaccaccaccaccctgcccaaaaattaacttttaaaggcaagcatagctatgttaactgcacagaaaccagtggacttgtatttatttacaacaaactctaaaaccaagccagtgactcaagagacagtgattttaaactcattaccaactcaagtcagctagaacacggtgaggactgatccttgttcaatggcaatgaacagttagttcaagggtaatctttataaattaaaagcaaaaaaattcaatgaatgtagagtaaccatttaatgttctggaatttttcatagaatttcactagtttgtgcaattaaagttatttacgaataaaactaccttaacacgggtcactactcggctggtgaaatatgtaatctgaaagtactatctctgagaagactgtcataaatacgctgttctggaatgcatgtggaacctagcaaccacctgcccttctctctctctgctttgccactaaggttctaagcatctttaagaatcagactgtttggtgaagttcttttccctctgacccaatctgagtgtacctccactattaactaagtgtttaaaacaaaaaacaaaacaaaaaaaaccccaccgcacaccggaattttgctgtaaaaaagttaattgtgtgtgtgagaggagggaggagagagagagggggaggagaaagagaggcagacagacggatagacttgacacacacacacacacagacagatacatacatgcacacagatacatacatgcacacaggcacacacgaggagggagagaagtcagagtgtactttggggggccttactccttcagaattcgctccacaaccatgtagaagttaccagaacacagtggccattatctacttacaccagcaaaggggcataaatgaacttagtatctgccttctccttcgccgcatccatccctaccgccgaatgaccacgtcctgcctgcctgtcctatacatgctgtacagtttccaagaaggctacgaaaaggtgtgcgtgggacccgcagacaaatttccttccactgagataaaaaggctaaaactaaagacaaacaaacaatcgctttgacgtggcgggccacgggggacggaacacccgtgggtaaagaggcgcaaaaaggagcgatccgtcccgtccgggaacgggagcccggggagcgcgcgttcctcctcccacccgctggggctcacggaaaccagagaactcagaccaggcagcgtctccccagccccctcgggcggcgcgggcggcttgctgagcccgggttccaggcccccgaggggtgtgaccggggccaggccggcagtgacaggcgccgccaaggacggcggcgcgctccggtcaccccggccgcggccgcccggccgcccggccgtccgcggcgccgcagaggcgagttccccgctcacttttgaagaagcgcagcgccaggccgtacagctcctccaggccgaagccccagtgctgctccatccgccgcgcctcctcggccgcgccctcagccgccgcctccccgggctccggcggctgccccgcgcgccgggccccggccagccccgggggacgaggccggcgacggctgcagcggggcgccctccgcgccgggccgctcctccgagtccgggctcagcgtgaggccgtcgagcgacacctcgagctgctctacgttcagctgcgccgccatctccgctcgcagcgcctcctcggcggggacaggcggcggccacgtatcgacttcctgctgacccctcacctccgctcgccgacaccggaacttccgctgccgaggcggctgcggcgtgaaggggcctggtgccccgcccccggcgtcttccgctcgccggctcgcccgccggcccgcccgctcggccctcgcgcggctctcctcgcttctcctcccttctccccggcgctgctcccgccgcggcgctcccgtgggcacccggccggccggccgcgttggccggggccgcgtgaggcgaaccacacgccgtagtcccgaccctccctgcagggagcgtccgcgtgccaagagtcgctcctggcaaggctctctgcacgccccggtttcacttagtctccacagagactctgaggagatgctcggcagatggcagtttttagtttttaagtagcaaacagggcattccgacccccctgagagttggctctcattttcctcccattttttgttcgctccgctgaggaagggagcgtttactgagcatttgctatggagctcaggctggcctggaactcacagttgtaactcgggttggccttttgtttagcctgctgcttcagcctcccaagtgttatgactacagtgcacgccactgggaccagcactaaggacagacagtgtgaggccaactgggctgctacccgtgccacagaagtgtagcgcccggggaccgaaacagtgcagtgtcggctacaggaaagtaccaaggtagttaaggagaaacagtcttgagaggacatagcagtctcgtttttgtttttggaggggttttttatttttgttgtttgtttgttagaactgagatccacctgcctccactaacaagtgttgggattaaaggagtccgcagggctgaacagggtggagagctgcataaccctggctgtcctggaacaaacttcatagaccagatcagacaggcctcgaactcacagagatccatccgcctccgactccagagtgctggcgttaaaggtgtgccctgctttctgttgttccctagcagagccttccaatcattaaaggtgaaaaattgtaagcctttttatataccttacactggacaaacactccagcctaggaatgttttgatgagtgaataagtgaatggtggcacacttcaattacacgcggtatcagttcagctcaacacatattaaaatacaaaggtgagcatttgtggtgtccaaccccaaggcatcatggtccaggaggtgtgcccaggccagagcactgtagtagggccaagctgctggaagacggtacttactgcctcagtgacgtgagcaggttctctaactttgtaagatgaaaataagaacgtcatctacctcttagtttgctgagaagactggactcatgcatatatctgatataaaattaagctatttagtgtctgtgggtctaacactggtgcttactgatactggctggggctataaagaggttctgaggtgtgctttatgttcacagccatcctgtcctgtgtgacaagacacggtccaagctgttacctgtagcacgaattctaattgttcttaataatgaaaactccgagtcagctatcagtgaaagctgaagaatcagaaaagcagagtggccagtcattagagttcttacctctaccaatgatcctgtcctctgcatcctcagattgactgctcagaatgcactgagctcctgtctcctcctgccttatattcctctctccacccagctacatggctcctgtctccacatccctagtgcgggaattacaggcatgtgatcccaagtgctaggatcacctttgtgtgagctctgtttctcttttagactggatcaattttgtgtagctcagggttgtcttgaactaacagagatccgaactgcctctgtcttccaattgctgggattaaaggtgtgtcaccactgcctggcctctattgctaactagtgtggctagctttacactctgatcttcaggcaagctttatttattaaagcatagacaaaatatcaacactatgtaaaatagattgatgatgttatctctttggtcacttctcttagtctgtttctgcactatcattatgtaccacagagagtagtttataaagaacagccctttgtcacagttgaccactgagatcttcaagatcaagacactggctgttcagaagactggttgttgtgtaacagtttcctccaagattaaaatagtctatcctgcaggaagctccttaagctggaaggtaaacaactcaaactagcttcagtaagtccctgaaactgaccagattcgcttaggcccctccttgccagagtgaacaattaagttgtctgaagtacccctcacctcacaggagagcagaccagctacctggaagcagcagaaactagccatcctgcctggaagaaatttagaccaactgaggcagctggagggactctctttaaactgttgccttgcctgtagactgcagtgtgctccaggttcccagctttgtgagctgtcaccaatgctgggttgggccttggtgatgcagctgtctttgggtcatttctgttctgtattcctataagtaacttcaataaaacttaatggttcgtcaagttggactttggtatccatactttggtgtgccgtggctccatatcttgggtgtgtagacctgtgtgttccgtggtcccaggaaagttttgttatacaacactggtaagggtccactttctggtccataggcatccatgttctttcccatggtaggaggaacaggacggtactttggggcctctaaataaggataattgtttcattcaggtgatgcccttgtgaccagtcacctcccaaacacttccttaatagtgtcattatatcctggttagattttaacatgaatttggggggatatgacgttcagtctacaacacagcaagtgtgtgtgtgtgtgtgtgtgtgtgtgtgtgtgtgtgtgtgtgtgtttatacagaagaaagaggctgggcattgtggcaaatagctggatcccagcacgtggagatgaaggtttaggagtctaaggcttggctggatagatggctcagcagttgagagcatgtctgctcttccagaggaccaattcccagcacccacatggcagctcacagctgtctgtaactccaattctggggcttctggtaacactcacacagacatacatggaggcaaaacaccaatgagtgggcgcgcgcgcgcgcgcgcacacacactcacacacacacacacacacacacacacacacacacacattgtcatctctatctagaagagggagaactcatttcttcctggttttatcatgcagtgttagtaggtttaggttacctcttcaaaagtgttccagaagctctatgaggtaaatgctaagatataattttcagtagctagcaccgttcctctctgcctgcctgcacagcacatcctctcattcctgagacagctttcttatgtatctcaaactcactgtgtagtccaagctagtctcaaacttaggcattcctcctgcctcagccttctgatgctgatgttacaggtgagctaccacaccacacctggcatttgttccgtctctttccctcctccctcctttcctacttgctttctaagacagtcacctgtactctagtctagtctaaaacttgctatttactgaagcatgacattgaactattttgacattttttattcatttgtgcaggacatagagcatgtggtggtaggggcggggtcagggaacaacttgttctctcctcccaccctgtggagcttagtgatccaactcaagttgtcatttggcagcaatagcctttactcactgatccatctcactggcccagcactaaacacttgctcctctttcctctacctcacaagtcttgggttgcagaaaatttgtaaaaatactcagtttttctcttcttggaatcgaggtctcatttgtgttatccaggctggcttcaaacttctgggctccagtcatcctcctgcctctgcctccgcagtagctgggaccacagatgtgtatactccacttgtcttaaaacattctttttggcctggcagtggtgggctttaatcctagcactgggggggggaggggttaagaggcaggtggatctctgagttcgaggccagcctggtctacaaagagagttccaggacgacctgggctgttacacagagaaaccctgtctacaaaaaccaaaaacaagcaaacgacattctttttgttttaagggtttatttgattgtttatttgtgtgtatgtgtgggtgggtccctgaagaagccagaagagggtgatgaatccttcagttctccacagtagagttatagcctggtctacagactagttctagtccagccagggctacatagtaagaccctgtctgaaacaaataacaaaatcacaaaaggacgaggagaaagggagtgtggagaaggaggggggagaggaagggaaggaggagatggataaaggcttttttccatcgagtccaaggccaaagcttaagccgcaaggtcccctgcgccccctgctgcccagcatcggtagtgctgcattagctgggcagaatggggctgtcggaggcactccactcttggggggagaagaaaggcgaccctgaaagtggaggggaaggactatgctgtgcacatgcccaagagccgcacaagcacagtcaaggactggttgaccccagatagtcgtctaccgaggacaaaaataatttatgttcctaataagaaccaaagttcatcagggggcaaacacctttaatcccagcgctcgggaggcagaggcagaggcaggcagatctctgtgagtttgagaccagactggtctacagatagagttccaggatagccaaagctacacacaaagtctcaaaaagtaaaaaattaattaaaaactaaaatctaacatgacatggccatatgatttaagcctcatatgtgtattcatgtgtatatgtacatgtgcatatatgtatctaagtgtgtgcaaatgttcacgtgcgtctgcatgtctgtatgtgtgtatgttccatacataggtatgtttcaggggtgtactccgggaagccagagaagagcatcgagtgccctcttctgtctgtttaccttactcctgtgagacaggctctaactctgaacctcgatatactggtagccagcaagccccagcatctctctctatcagttccccacagcgcctacaacagtgctgggttatggaaaattattttaaggtgtgttacttttgtttatgctgcatttgtttaatttgtgaagctgtgttactttgtctaaaacacctgatggtttaataaagagctgaacaaccaatagggaggcaggagcaagggtaggtggggcagagagaataaatagggggagaaatatgggaaaaaggaagaagtagcagaggaggatgctagggccagccacggggtaagaggcaaagtaagacacacagaagtaagaaaaggaaaaagcccagaggcaaaagatagactggataatttaagataagaaagactggctagaaacaagccaagctagtatgggcatttataagaaagaataaacctccatgtgtgagtgatttatttgggtggtgagtggcgggcccccaaagagtaagagcaaagaatgacaaaaacagacaacaatgctgtgagctattacaggtgagtgcatggccacacacagctgccctggctggcctggaactctctatgtagaccaggctggccttgaactcacatgaactctgcctttgtctgcacccaagtactggggttaaaggcatgcaccaccatgaatggtcctcagcttttttttttttttaacatggtgttggagttcaaactcttacccaatgaattatctctcctgagtaaaagcattcttgtttaggaagtacttggaattaatcctagagcctcactgtgagagatctacctgcctctgccttctgagtgctggaattaaaggcgtgtgccaccactgcctgactgagaacaagtattcttaaccactgagccatcatgttatacattctatgtttatccatttcctacaaatttttcttttcttcttctggttttctgagacaaggtttctttataatagtcctggcttttctggaactcactctgtagataaggctgacctcaaactcacaaagatatgcctgcctctgcctcccaagtgctgggataaaaggcatgcaccaccacccggctcttacaaatttttttttaaagatttatttatttatcatgtatacagtgcacgacagaagagggcaccggatcccatcacacatggttgtgagccaccatgtggttgctgggaattgaactcaggacctgtggaagagcagtcggtgctcttaacccctgagccatctctccagccttcctacaaatttttaaacttcatttttctttagagctacagtattccattttacttataccagacttttgttatctatttatctgatggacagttaggttgattccaattatttgctttagtgaacaaagtaaatacaattattatcattatcattgttctaattttgtcattatttaatccagggagccagggagatggctgagatggtaaaggcacttgcagtgaagctgaccaagttcgatttgcttcctgggatccacaagtaaaaaaaggaaacccattccttggaactgtccctcagtcccacacacaccagggcatccgtgccccctcccccacgctaagtaaacaaacagaatttaatcctttatactgcctaatttctttctttcttttttggtttgtttattttcaagacaggctttctttgtgtaaccctggctggcctggaactcactctgaagaccaggctggcctcacagagatctgattgcctctgcctcctgagtgtagtgttgggattaaaggcatttgccaccacagcccagggtcattgcctaatttctaaactgggcatcaccacagtgtgtctacacaggaaaagcagcatctacagagcctgattctgcctcggatcttagacatctatccagatacaagctaagggtgtcatacacaaggatgactttttaaatgtcactcatttgtctgaggaggaaaagtacagctaatggtgctggatatcaaacctagggcctcacacgtgctacaaaagctctctaccactcactgagctacatcttcagcccttttttatgtttttcatttggagatgagttctcactaaattccaagattgaccttaaacttaccttatagcctcagtaggcctggagcttctaatctctccgcttctgcctcctgatgatttgggtttacagacctgtaaaaataaactactaagcctagcttattttgattttaaaccacttttccccttcctctccttttcccctttcttccttctttcttttttctcctttccttccctctcttccttatccttttattcctctttttccttggagacagggtttcactaagtatctgaggctggcctggaatttgctgtgagctcaggatagccttgacattgctatctgtctcagattcccaagtgctgagattataggtatgcaccaccacaccttgcctctaaacatatttttcttcaaagtctgtggcaatgttgcctcctagtgttcaacacatggcagattctaagtaaacccttgtccagtagatgaacagatgtgtataggttagggcctctttcttaccctcatttttccttctgagaatctttctttttttttgggggggggtgcttcaagatggtttctctgtggctttggaggctgtcctggaactagctcttgtggaccaggctagtctcaaactcacagatccacttgcttctgctacttgagagctgggactaagggcgtgcaccaccactgccagatgagaatatttcttaaatttactgcatcagtccctcaaatgttccctagttctcagaaagcaggttaagttgccaaattaccctaagtgtaatttttgtaattttcttctccttccaaaatctcaactatttccacctattcaattaagaaagatgtattggtctctttctgtatgcacagaacaaagcaaggaacttcgaaaataaaaattccccagcattcattcaacaaatgtctgagcaccgttcacaaattcaagtacaataatctcagcacttgagaggctgagacagtagaattactgtgagtttaaagccagacagggctgcagaacaagattctagcaaaacaaagaggtgcagagaccgtggagtgtttgctcctccgtgtaccacggtgcacacccaactacacccaaactaggatggccttcaacttgagattcttctgtcttagtctcctgaatgctgggctctgccttgagctctctgtgatctgcctgcctctgtctcccaaatgctgggactaaaggtgtgcaccctgcctggacaacacctggcttcttatctttcttcaaaatctatggctgcaatgcctcctgctgcctgacacatgctcgatactgaataaacatttgttttggattaagcaaacatgatattcaggtcattttcctttagggaacatttcctaaagcctctttgtcaagcaggtcattttttagtagcatttctaccatcccaaggaaacccatccatccaaaagtgtattcacacagtgaccctgggggtctcctgaatggtaaaaaaataaaagagaaaagtggggaaggaactgtgaacattggagcaggactcctctgagtacaatgaagagagagatgcttgcctttctccatggaagcatcaaggaacctgccatggatgcatgtggatagcagtgactggtgtgtttgtggtgtctgttgcttgagttttgatttttggtttgggttctttgcggctagggctggaaccagcctcacacatgctaggcaagtgctgtactacagagctatatactctagcccagaaatacaatcttttaaattacaacctctaagaaaaacaattagtttatatggttgactctcccctggaaattttagtgtacattaaaaccatagtgtgtaagccagccgctgcaccgtggatcatctgccacccccaggactgagcaactcagagacttctgtccccagggaccactccctgagaatgctagaggaaccaggaggagtgagaggttgctggtctggctgctgtctccctgcatatctcctagcagcaggaagtcagacatccaggaaaatgtggtgtgcaagccactgtgttggcttcccaggtgtcagacagcaggattctggctggggcagatacggaggtgctaaacagagccccacttataaaagaccttataacaaatactaaaggcacaggccaccgtacctccccaaggctcagtcttggatgtcaagttgaatctatttgttttttaaaagacaatattgtttttgtattttttacttctctctttgtttcccttttttctttcattttattttagacaaggtctcaccagttggccttgaactatgtagtcaaggatgaacatcaaacttcaatttttctaatttagtattttttattacttaattttttctttgacaactttatacatacctccaacttcccatcttcctcccccttcctcttgagtacctggattataggcatgtgccaccatgcctagttttatatcgtgtattcgacccagcccagggcctcatacgtgcgaggcaagcattttacctacatccccagtcagcacagtcttctttctgagacagggtttctctgtttaacagttctggctgttctggacctcactttgtagaccaggctggcttcgaactcactgagatccgcctgcctctctctgcctcccgagtgctgggattaaaggcgtgcgccaccaccaacggcatcatttgtatttttgagacagggtctgctacgtagctttggtgtacctggtactcaaagcctagcctgcctgacttcaaactcatagtaatcctcctgcctcagcttcctgagtactagggtcagaggatcagaactatgagccatgatgccctgctgcttaagtcttctccccctctctcttatccctcctcctctccctcttccccctgctctctctcctccccctcctctccctcctcctctccctcctcctctctctcctccccctcctctccctccttttctataaataagatgtttctccagactagcctccagccccagggaatcttctttcttacacagcctacaccctcaccacatcttattcatctttagttttgggggtgaagtcttctattgtagctcagactggaccccaaatccaaattctctttcttcagccgcctcagtgtctgaggttagaggcatgcaccaccacacctagtttaaacgctttcctcaaagaatctaaacggacttttagtttttaattatgtgtttatgagagagtatgggctcgtgtatgtgagtgtggtgtctgctggtgtcacagaaggccgtgcatgggaccccctggaactggagaaatagccagttgtcaggtatctgatgtgagtgctggcctcgaactcacagagatccagctgtactctgcctcccatgtgctggaactagaggcgtgggccaccaccaccactaccaccgcgcggtgagacagaagtattaattggtggttaccaggaggcgtgggatgtcactgtctagtggaggtcccctttaggctaacaggaatattttagttctagatagagctaatggttgcacaacaaaaagaatggactaaataccacggtgttgtacactagatgatgaccagtggggcagcgggacggctcagtgagacagacagggccctcactgcacaagccagaagatacgagtgcagtccctagaacccaaggaaaggtagaaggagagaatcatccccacaaagctgccctttgacctcctcacgccaggcatggcatggcgtgcctccctccgtattacatcatatacacaataataatattaaataaagttttctaatagggactaaggtcttgtttaggagtgccgagagagggtggtgaggagcacacactggccactgccaggccactatgcagcagggagcacctgtctgttttgttcctagattggttgtctgaagacagcgctgttatctcaagactcccctcatttggagttctcagaagggacatggattgagtcctgtatgacagcagggaggcagagttccgaggcaggcagctctggctttcccccacccctgaggcagtggagtccagagagtgagcagagtttggaagcgtgagctgatcctcccctcctagcaaattgggaggaccggtcatgacgagagcggactgtaactggtcagtggcacagcctctcgagaaacacgttcagcgttgctccacttcctccttttaacaggttcagttcgtgggctccgtcaggagctgtcccaagtcaccactaagtgtgacactaagtgtgtatgagaaagagagctaagatccttccgtggtgttgtatgctgtggaaaaattcttttgtaagctgtgacggtgcgttgctctcattgctaatgaaaacggattgagtggcaggcagggttttcagggcggaatgaatgctgggaagagggagggtgaaatcagaaaagtcgtgagtcagatggaaagtaaccgagcctcggtgcaacacatagattaataaagtgggttaatttacagtatgaaatctagttaaaaacaagcctaatctaccggctgagcatttataattaatagtaagtctccatgtggctatttgggagctggctggtgggacagaaaactctgcccacatttgtaactgggtgggtgtgaagtgaagggttggggagagccattggaaagatgagaggatgataggcctgtgtctcccaacagagagcaagggcagtgctgcctgggagctgagagctacttcctgccgcatgtgatacaacattcaaccaggaaagaactcagcccccaccccaaagccctagaacactgtggaggaggacaagcatccaccctaacaggaaaggccaagtatcaaggaacttgatataaatgaaaacccaacaggagggtggtcatcccagccttccatcccagcagttttgaacatggcatcagtcatgcctacaggcttcaagatcatctctaatctgcacgagtctctgtgtcagcaggcatggcaggtcctttcttgccacctggctccccaggccagagctggagcctccttacaggccttgatgagatctgaattgggggttgttctagtgcctgatggacagagctgaggaagggtgacaggagagggagaggagccagccttcaggctttaaacctctcccattccagacaacctgggactctagggacaagctttaacatccctggaaaacagtgatgagatcatctacttgccaatcctgtgtgtgtgtgtgtgtgtgtgtgtgtgtgtgtgtgtgtgtgtgtgtggtttgtttgtttattttttgttttttgagacagggcttctctgtgtaggcctcggactcatggagagtgctggaattaaaggcgtgtgccaccattgcccagccaccactcttttttttttgtttttgtttttgtttttgttttttcgagagagggtttctctgtgtagctttggaggctgtcctggaactagctcttgtagaccaggctggtctcaaactcacagagatccgcctgcctctgcctcccaagtgctgggattaaaggcatgcgccaccaacgcccagcatcttttttttttttaggacaggttttcactgtgtgcccaggctggtcttgaacccccagctccattgatcctcatgtctcggtctcacagtacctcaaactactgaatgctgctaaggaacacacatggaggtcagaggacaactctcaggagttagcgttcacctcctatcttgtctgaggcggggtctctctcgtctctgctgcatggacaggtactccagactaactggcccatgaaagttggttttcctgtctctgtttctcacctgggagtgctggagtattgctctccagctttgcacatgggtttcacagactctaacttggcctgtcagggttatgattacaatgcgatcactttatacactgagccatcacccttgccaagcaagctctatgattgtttgtttaatagctgatcaaaggggatgaatgaatccagactaagaactagtagaaaaattacatatatggctttcaggtctgttatgctttgccttctaatgtatagtttagaaaagtttggaaataattgctgtgttctagggctgggtgtgtgattctacaggaagaactttgtccatcaactctctctctttctttctttctctctctctctctctctctctctctctctctctctctctctcacacacacacacacacacacacacacaaacacacacacacacacacacacacacacacacacacacacacatacacacacacacgtgtcccaggatcccaatatgcctctgagtttggggacagctgtgctcagtctcttcttggtctggaaaccaaggctcatggacaaaggtcaggctcactcagggccaccttcctggtccccagccttgaactcaggcccccttcccggggaaatgacagatttcatccctgataagggccctccaggcttcagcaccctcacaccctaggtgtggctgatggcatgctaacttcccactggcgcctctccaggtggcttcgcaactacccgtcagctgggcacttcctccagccaggagagcctttcatcccacctcaggctttcatcccagcctttaatgtaagtgaaaagtttcagctaccagagcctgcagggacgaagggagggaaccaggtatgctctccctaagactttaagagtggctgtccattgcactgtccagtaaggcaaaccctggactgtatgtctagttcctctggagacagactagttaaaggcactctgtgtcttctaggaaaatggtaaaccagagtctctatttttttgttttttttgttttggggttttttgtttttgtttttgtcttgttttatttttgtttttttgagacagagtttccctgtgtaactgccctggctgtcctggcactccctttgtagaccaagagggcctgaaactcacagagatccactagcctctgccttgagggtgccaggattaaaggcgtgtgccaccacacctggcccgagtctcatttttggatgagctctgttggaaccttcttactgtagctggctaagtgggtgctttagcctctacctctgcaccctcatgagtttaggccccagatcctcatataacctccagctcaacacctaccaccagagctgccctgagatcccctaaggcctgccctccaggatctcacagaccagatggcagccaaaaccagcacacatgaaaaagacacctactttacaaagagatgtacatgagatgtgacagacttgagtgggctgggtgggttccttgccaggggcctggccaggtggcagtcaggggcagaaggcagagctaatgtaaatgtgagcaactcctccaggctcgcagagtctgcagcctctctctgtgctctcacacacagaggactgacaacaaacaccacaagctggatgttgtaacatgcaagcagggagaacctttagagggtagtggatgctcccagtaggctcatcagaccttcctaacctggaccctggctgtccctatctcctgccccccacctcaaagagtcccaagaagcaaacacacacctgtccccaagccatgtgtttctgcttttgtttgttttgtttttccagacaggatttctctgtgtagcactgtatgtcctggaactcactctgtagacctggctggccttgaactcaaatctgcctgcctctgcctcccgagagctaggattaaaggtatgtgccatcactgcccgaccccaagtgcttctttaaatctaattcttaacctaggttccccaggttgtatctttggatcaagacaggtggcccccaaggccacagcccagaccactcttgcttatggacctgctggaatgaacttaaactattcttccacctgattcagtggatggtaattccaaagcaggacttgccttagtaatacagggtctttttaataaccctgggttcaagttcatttcactgggatatcccagtccttttaaatctagactataccaaagagcacaagagttcggggacaattgctgtctccgaggcctcaaaagtatgtaaataaaagttaaaagtatgggggctggagagatggctcagaggttaagagcactgactgctcttccagaggtcctgagttcagttcccagcaaccacatggtggctcacaaccatccgttatgagatctggtgcactcttctggtgtgcagatatacatggaagcagaatgttgtatacataataaataaataaaaatcttaaaaaaaaagttaaaagtatggctgccttcactcaggtgcttctcccctgaagatttgcaaacatgcagatggtggggtgtgcactcggaactttctttcttccttccttcctttcctttttttattttgtgtgtgtggtggtggtagtggggttcaagacagggtttctctgtgtagctctagctgtcctggaacttgctctgtagatcaggctggcctcgaactcagattgacctgtgcctcctgtgtgctaggattaaacaagtgcaccaccaccgcccggttcagaaatttctttcaattaacatatcaaatagaaattgagattacaggttttatagtatcctaggcacattggggacccggcatgttgctgcttgaatatgatttgtcatgttgctagagatacagttcagtggcccagtacttgtctagcagctatgaagtcctgggttcaatccctagctctgcaataaacagacagagaaacaaacaagacttctgacattctggacattgaatggtgttttaaaaaagtcagatgtggtgacacaagcttgagatgccaacactctgagacagaaggagagattgtcaagatcaccaacagcctgggcaacattgtaagaccatgcttcaaaacctcaaaaaagggccagtgagaaaactcagcaggtacatgtatatgcctcaatgcctgacaaactgaatttcatcccctgggtccacatgatggaaggaaggagagaaccgactctggcaagttgttgtcctctgggcttgattttcacactgtggtacacacacacacacacacacacacacacacacacacacacacacactctgctggttatgagctggtcctcttctgagcttcccgagataattctcatgggggaaatgtaacaatatacaaaactgttagggacagcccagaagtcagcactgagtccccaagttacgtgcactggacagccaaggtggggaaggcggtttcctggaggaacaagtgtccctggggcagtggaagaagagcctgttgtcctttcttcgggagagcaccctacccttccacatcctacggatgcaaagccctggtccccagtctgtccagggcctcaccagctactcgcagctgtttctgcacaggcttggcacccatgcatctgcaccttggtataagtccatctgctgttgctcctcctaacctgcctgccccatgctgcttccaggcttgcccgatctctgtcctccccaccgcctaccgccttctctccacaggtagctcgtgctcctaccagccaagtccagtgctctcaggaatggtgctccctggggatgcagtgaatgaaggcttggcgctgtgatttcaacaaaactgctcccaactgagctcatttgaggcactgccttcctcctgctcctgtccagcctggagagccgactcccaccctgcaacccctcaccatttcattttccttgtctccacctatttcaaatgcacggccttttttctgttgtaatacttgagaatgggacccatatcaccaacataggacacatagtgctcttaccactgtgttgcaacccagcactgcctcctcttcctctccttccctccccctccccccttcctccttctctgcttccccctccttatggctctgacgactcaagtcagggtctcatatatgctaggcaaatgattccaggccaaaccagttaattcttaaaaaaaaaaaaaaaaaaaaaaaaaaaaaggttgttacatttagtgtgtgtggcgcacacaaatccacacccatctgtagaagtcagagggcagtttgcaggaccagctttctcctgggcagcaagctcttctacttgctgaatcatctgcctcagccccagatagtttctttagagtccttactccttcacagcttgccactgcttctcattttcatctgtgtctaaatattccagggcagaatatttgctgtttcaaccttagactgggctgtttctccaaggagtattttcccccactttagtgggaaatggtagctagcaagcaaagtcccagtgttaatgagcttaattaatccccaaacacacaaacaagttaaaaagagggctgtctgtggcactgtttgtaaaagtaatgagacaacgtgaaagtatatttggagcacttaatagaaaagggttggggcagagttaagggagatctccaagaggtgagtcatgccagctgcacaggtgtggtgaaagccagccagccaccacattgggcggtggtggtgcaggcctttaaccccagcacttgggaggcaaaggcaggtggctctctgtgagttcgagaccagcctggtctacaagagctaattccaggacagcctccaaagccacagagaaaccctgtctcgaaaaaaccaacaccaacaaaaaagccatccagccactcaagccccagtaggggtgtcccagcatctcaatgtcagacaatggatttgagaaccaaatgctctgtcttgttgatgctttgacacaggctcttgctgagatgacaagtgtgtgtgcaccaccacacctgccttcaagcatctcgacagttccttcagatcttcagttccagggttttctttctcggctgttttccaccttattggttaggcatgaatacctgcaagaggaaaaggtgccgttctttttgaagattccccatgccaggatcaaaagcgatgctgtgttagtcatatgaatttgtacctcccgcccggagaacacagaaaggcttctaatggcttaccacgttatgccttttggaaggacgtgtctctgtctattgtaaccactgactgtgaaataaacttcagaaactgaaggtggggagcagagcagaggaagtcaaagtgaggccgccgggatcaaagggacaaagagcccctgagatctcaagggggaagtagagccattgactcccccgggctgccctttcctggtttcccttttaataaacaccctgggctcctccaccaggtccagggcagcccagggagagggcccaactccaacaacaaagagagcaggggaagagagcacttagcacttggggcgggaagacagacctctggtatttgggtgttggggatggaaaggtctggggtgggcatggaagactcagaatggatagtgacaactccattgtctgtcccagcctggcttggctctgggtagccaaggctccccccatggcacaggtgtgtttgaggatcaccttctgtatcacctgtgtctgtttcaacagatgttatcaacactaaatatgagtagtggcccaaagcatttagcacattttgtcatatgagctggccctggggttagagagggcaaatccagaccctaacatcagctttggctgtctgagctagtcttgaacttcaatctgctcttcagtccccagggtattgacctgtttctgccttgtgaggttctttatggagccttaaactgcacagtgtatctatgaagcaactctctctctctctctctctctctctctctctgtgtgtgtgtgtgtgtgtataatttaaagattattttgttggtttttgttttgggacagggtcttactatgtaagccttggctgtcctgggactcaccctgtagaacaggctgaggctggtcttgagctctgcctgacagaggtcagcctgcttctgcctccctagtgctgggattaaatgcgtgtgccactaagttcagctaatttaaaggtattattaagaaggactctttatatttcccatagagaaatgaatatgaagaaattgatatttaatatatatttacagaagagaaatcgccagcagaacatagaacttgagtttaataaatatttatcgggttggggaagtagtttagtggccagagtgttttctgttcaagcatggggacctgagtttggatcctcagcatgaaaagagaacatgcctggagtcccagtgctgggagacaagaaacaaccagaccccaggagcttgctgcccagtccctctatccaaatccacgaactcagcgttcagtaacagaccccatagcaaaaagccaagttggaggggccagagagttggcacagaggttaagagcacttgctgctcttgcagaggatccaggtttggttcccagagcctacaccgggcagagcacaacagcttatagctccggcttcagggactccaacgctatcttctagtccctgtcaacactacactcgcatgcatgggcacacgtactcacatatgtacacagacaaatgaaaaaaaattaaaaatagggcattggtggcgcacgcctttaatcccagcactcgggaggcagaggcaggcagatctttgtgagttcgaggccagcctggtctccagagcgagtgccaggataggctccaaagctacacagagaaaccctgtctcgaaaaaccaaaacaaacaaacaaacaaacaaacaaacaaaaaaaaacccaaaaaaccaaaaaaccctaactaagacagaagtggaaacaataatcaggatatattgtacaaaaaaaactaaaaataagatagagagcaactgaggaagaccgccttacatcatctctgccttccatacacaggcacacacacacgcacacacacacacaaacacgcacatgcatccatacacacatacacacacacagacatgcagtgcatccacgcaatatacaaacatgtgcacgcacccacacatgtacacacatacaaacatgtagatatatccacacatgtacacacatacaaacatgtacacacacccacacgtgtacacatatacaaacatgtacacacatccacacatgtacacacatacaaatgtgtacacacacccacacatgtacacacatacaagcatgtacacacacccacatatgtacacacatacaaacatgtatgtgcacgtttgccacacacacaaagtacttattaatttcggggtctctttgtgtcatgggaggacaagtgtgacgttgcttctcttctctggcccttctgtgggtgctggggtcggccttgggccacagccttcgtggccagtgcctttgcccactgagccatcttgtcagccctcatacaaaatcttcatgaaacgtcctgaggcaaaggagcagtaggtcgctgtcattgcaggtgaatgcacaggggagctttcgcacactccctgcagtggccgccacccccgaccctcatacgcgaacaagggaaaacccacatgtccctgtacgatagatcacattgcattctttgcttcagttttgtaaaagtcaagttttgtttgtttttgttttgctcttcagggaccaaacccagggccttgggcatgctgcagtgttggtcttgttaaatcaaatgttgtccctttcttcatttatggtctttttattttccaggatgcaatgcagaatattatattacagttattcatccaaaaattgagactgccttgctatattcccagcataagaaagatgaatccggccaggtggtggtgacgaacacctttaatcccagcacttgggaggcagagagaggcaggcagatctctgagtttgaggccagcctggtccgcaaagtgagtttcaggacagctaagactattagacaaagaaaccctatctcgaaaatttttaaaaaaagaaagaaagttgagccaagagggtaaaaaattccaggacagtctggattgcatggcaagaccttgtctcaaaagaaaaaaacaaaaaaacaaaacaacaaaaaaaaacaaaaacaataaaacgagaattctcaaaaggcttaaaaaatgcattcccaaacttatttatttatttatttatttatttatttttgtttttgaggcagggtcttgttatgtagctctggctggcttggaattccctatgtagagcaggtgggaattggtatgatcctcctgtctcaacctcccaagtactggggcaacaggcatttgccaccacagctgggttttgtgaacatgatttaaaataactgaagcaatgctgaaggacatgaaaagcactctctctctctctctctctctctctctctccttttctttaaacaaggtctctctatatgacacagctctgactgtcctgaaactcactacataaacccggctggcctcacattcacagaaaccctcccttctcggcctcctgagtgttggcattaaaggtgtgcaccatctgcctgcctgacagtttttctttctatcacttccaagtccaacctgagccttctatgtatctgcgcaaggactatattttaggcacgtccaagcacatgcaagaagatcctcagttcagagccagagagatgctcagctggtcaaggtgcttgccaccaagtctgagtttcctctctgggcttacataaaggaaggacagaaccatgtcccacaaatcatcagcccatttccctgcctgataggtcccctctccagcaagcagagggtggcagaggacagggatggacaaagaacctgtgatgcttttcaggttggaggattcctacagcccagaattcagcctgagtctctttggaaggtttggctcttgctggcaagttcccactaggagcaacagccacagacctctggtttcctttccaggatggcttctttttgttttgttttttgttttttgttgtttgtttttcaagacagggtttctctgtggctttggaggctgttctggaactagcttttgtagaccaggctggtctcaaactcagagatccgcctgcctctgcctcccgagtgtgcaccaccactgcctggcccaggctggcttcttgatccctcaggtacagcaatgcagccatcactgcagctgaaggacagcagctcctaggtggcagtgaccggcgtctctcacctccaaggtaactggggtccagtgcttcttccatggagtcacttctggaggtcagcttggtgcaccatctcttcaggtctctgggcttgtatttcttgaagagtaagatgggaacacacatatctactacatacataagcacagtctagcatagccataaatgtctttgcctttaaataattcattttaaacaatggattaaaagtgagtgatgggctgggcgtgtaatccagtggtaagggccctgttggcatgcgcaaggccctggatttgatcctcagcatcacggggggtgggtgggtgggtggggagaataaaatcatgtatgaaatttcctgtttaggaggctgaggcaggtagatctcaagttcaaggccagcctgggctacatagtgagacccagtctctaaataaacaaacgaaagctgtaagactacagtctagttgctatggtgcctgcctggcacacgcaggtcggtgtttgatctccaatattgtataaaatcaggcattatgtggaagtctcgcaattaaagtgttgaggtgtggaggtgggaaggccagaggttcaaagtcatccttggctacatagagtttgaggctagctagcctggaatacacaagaccctgatatatgtatggggtcgggggaggcatagaaaataaaaatctgatttcccattccagactctgtgagtctggcaaagaaatagaagaggaaagaaaaggagatgtttggaggagtgtgtgcctgagagagagagagagagagagagagagagagagagagagagtgtgtgtgtgtatgtgtgtgtgtgtgtgagagagagagagagagagagagagagagagagagagagagaatatgtgtgtttgagggaagagttagatcagcagtggatctggacccctttggggagttgaacaaccccacaggggtcacatatcagatagcctgcatatcagatatttatattatgattcatataagtagtaaataataattttatggttgggggtcaccacaacatgaggaactgtacaaagggccacagcattaagaaggttgggagctagccaggcagtggtggtgcacgcctttaatcccagcacttgggaggcagaggcaggtgaatctcagtgagttccaggccagcctggtctaccaagcaagttctaggacagctaaggcttcacagaaaacccctgtgtaaaaagaagaagaagaaggaggaggaggaggagggagaggaggaggagggaggaggaggtagaggaggtggaggaggaggagggaggaggaggaggagggaggaagaggggaggggggaggagggggaggaggaggaggaaggggaggaggaggaggaggaaggggaggaggaggagaaggaggaggaggaagaggaggaggaagaggagaagaagaagaagaagaagaagaagaagaagaagaagaagaagaagaagaagaagaagaagagaaggctgaggagagccactagattagccagaaaaagccggcctggggttctcaggatctatggaatgcaggaggccaggacaactcaagcctggaactttcagcagctctcagatcactctgtgctttcaaacctggaatgattgcccatcgtgaagatatgcccacttgctgttcttccagaggacaagggttcagttctcagcaccatgtcaggcagcttacagccagcatcttggaaacagtggacacattgtcctcttttggcctccttggggacccacatgcgtgggagcaaacatgctgtatttatgaacagcacgcaagagaacatgccctctcctctgagacctcctattagcattgtagaaccagcaggaacagtcctgggctgggctgtggaacacccctccctcagtagagagctcccttgagactgtggaagcggcactctggtgctgtgtccttctgttgcagccttgcaggcctcggatctctctactaagtaaccaagatctagccaaagcttttgcagagtgcctagcaagatttcacacacgagcacatgcacacacgcacgcgcacgtgcacacacacatacacacatgcatacacatttcaaaagaaagcagaggctatagctcagtggacgacttcttcaggattttccgggttccatgttctatcctccggaccagagagtgggtggagcggggagacgacttgtaagaataaatgaattcacggagaagtcataattaaactacaaatcagcataaaacaaaacgggaacttcaaatgggccccaggggacaaaggaaaggcattagagggagcagaaacttcaaggagtgctctgagcgctgttgggactctctcggagcgctaacccggctcaacttcaacccgcccagcttacaccatccttcttgacaagtcacagatactccaggcaggagcatcgtccctgctcaggatgtgggcctacccgctttgaggtttctttatcttcacccccctcggattcaggatgtgtcggggtggtttggaggaggacagcgctaggctgtttgaccaacctggagtaaggtctagcacatagcaggggtggtaaacagcgcctttgatggtgacaggcggacagcgggcccggctcggagcggggacctgagaacccggcccaggagagatccgggcgctcttgagggaccttctgaccaagaagaggggattctgatggaatctggcgggcacttggggcggcccctcagaagcggatctgttctaggtatgtggattggtggtcgggctggctggggatgggcgtggaagggacggagcggcttggctggctcaagttcgcgcctccctccctccgtccccaggtcagcggaaacgattattcccgcggcgtctggcggggccggggcgggctcgcaccccaaggagacctggcctgcctccccgacgcctttgatggcgccgccgccccctccccagccccgggtggctataactgcaggcgcgcggggggcgtgcgagtgtcggcgagccatggctgcagcagggtcccagcagctccagttcgccgagggcgctgttttcccctccttcccggccgcgcacccgggagggccgccgctcccgccccacgcgcccccggactcccgcgccccggcggtcacgccgtgcttttcaggccgaagcccgggacccgcagcgcagacccccgccggcctggatccgccccgggcccccaaaggcgcggccgccccgtcggcgccgccgcagcgccgcaagcgcacgtcgttcagctcggagcagctgcagctgctggagctcgtcttccgccagactatgtaccccgacatccaattgcgggagcgcctggcctcgctcacgctgctccccgagtccaggatccaggtgagtgcgtttgcaggcgcgcggaggagtggagggcatcgggagtcgcaggcttgttgagtcgtttccccaagttactttcttgaacctcgtgattctagaccactaaatagagatgtcagtaaaggccttgtaatttgcgctgctaggaggcttcctgacccccctgaaaggtcccctcaggagagcgatgggaagtagttgagcattttccagtgtcctctaagaagacaaaggagaggggtgaggtcacgagtcttcctctggttttgattttaagtagtagagcacggttgaatcaccaggtacctttaaggcaagcaactttcttctaactttgaaaaacggagtgcaaagtgagtttcttgtccggagtaatttagatcagaatcctggagagagaagctgcgcgccacactcgtgtgtgtgtgtgtgtgtgtgtgtgtgtgtgtgtgtgtgtgtgtgtgtgtgtgtgtgtttgagacaggctaactctggtagtcaggtgctaagtaggcaggctggacttgaattcacaatcctcctgttccagcttcctgagtgcttggattacagctttgtctctccgcctccctcccccaaattagaaactcgccgtcctgactgttagtctgtgcccccaaatgcagttttatgtaggaggcctcatttaatccaaggagagtgtggaccgctcccagccccagccccgccttttttctggccagcccagaactcgctctgatataccaggctggcttcaactcagagatcccgcctgcctctgtttccctggagccctgggattaaaagtatacactacaaccacccagcttcagctgtcactttcaacagttgtcaccagaggcttcctaagcaggccacattgagtgatcatggagacacagcaaagaaatttacacacagaaatgaggttcattaaggaaaaatacctacgtgctttgacaggggagtccagacattcaaaactggactctaaataatttgaaagtctgtcaccaaggcagagtagccctgtcttgttgcccaagaactttggcgcccttacttctgtgacctcttttctcattgcaaaagtcccatataaagtgtagacaggtgagtgtgctggcccatgcctgaaatcccagcacttaggacacttaggaggcagaagaatcaagggactcaatgtcatccctgcctgtatatccagtgtgaagcgcctgggatccacaagacccccccccccaccccacccccaccccgtctctgtggctttggaggctgtcctggcactcgctctgtagaccaggctgacctcgaactcacagatccacctgcctctgcctccccagtgctgggattaaaggcatgcgccaccaaggcctggcgacccgtctttcatttattttttaatgtgtaaaatgaaaaacagacaaacaaaccaagtatagcaagtgtagacagaaccaggctccactccagctttgcatctgagaatgcctggagaagtctggtgccccaaccatcaaaaaccaactcaagtgctttctgtaaaccacaggctctgagcagagagccatggctaataataactggcatttatattgctcgttgagaacaagctgatagggaagaactctgtgccagtctggggatagcttgctttgtagagggcttgcctagcgtgcatggtgctgtgccagctccacacaaaccaggtgtggtgatgcatgcctataaccccagctctggggaagtagaggaaggagaattggaaattcaaggtcaaagtcatccttggcgacaacctaagtttgatgctatctcaataaaagcccccaaaccaacaacaaaaactccaactcaaagcagctgtgcggtgttttcctcctgtctcccaggtgtggttccagaacagacgggccaagtccaggcgccagagtgggaagtggtttcagcccttatcagcaaggcgggaagcttggctccatcgctctgctccagggactgaagcaagatgtttgaagccccagccgcctctgcaggcagatgtgaactgccttccagatcccaacagagctggaggaggcgtctgtgactctggttctcaaggtcagagttttgatacctatccaccgctctcggaagacttcggctcaaagttggactcatgggaagagcacatcttctctgctttcggtaatttttgacgattctgggagagttcaggatgcactaagaggagtccggggagacacgaaccagaacactactcttaccctgactggccgtggccttgttgttgatcatggttctggatcatttctcacttgaaggtttctctcctttttgccactgagcctttaccggtggcttgttctctgtggccactcatccttccacccaggcgcacctgtgaacctcagagtctctacattcaatttggtccattccccctgggatatccttatttttcagacttgttgttcagaacttgttttcttcatgggaaccttcagattgactcaatgtccccttttccttggcagccgctgtctcctcatggcccctccaggacccacagcctagagtcagtcactcattctagccaacaccctcaactctaaccgtatcaccaagatttattactctttttaactgagcctcttgttttgatcttgaccttgctgtgtagttaaggatgaccttgaatgcctgtccttctacgcttgtcttccgagttctgggatcactagtgtgtgccaccgtgactagatgttgctatatttggttaaaattgtatgatatacaacagatatatccaagtcaatctgtgtaacacatgtatgacctcacatagctgcctcttttttttctgtgatgacaccgaatctattattttagcaattttcaggtatatggtatgttgttattaattatagccattaccatagatttcctcagcttagttttcctaaccgaaactgtgccctaaacacctctcccctgctcccctcttgactggttcttcatctggcctgtcatctttacactcatcactaaagaggctacattcaagttcttccaggagccccagtgcatctcattccccacttactcagaaaagaagtgactctatttggaaatctgtagtagcctccagttatcaaattatgctcccaataaaagacaccatcttcagcttatgcaaacctttagatcatttatccacagtacacctctctgtctcactgattcctttctggttgggactcattgaaaaaagtttctttttaatttttttttaactttacgtgcattggtgttttgcctgcctgcatgcctgtgtgagggtgtcagatcttggagttacagacagttgtgagctgctatgtgggttctgggaattgaacttgggtggtcctctggaagagcagccagccccaccccctttaaatttatttttgttttaagtttctttttcaactgggtgatggtggcagacacctttaatcccagaatttgggaggcagatgcaggtggatctctgagttccaggccagcctgggctacagagttccaggacaggctccaaacctacacagagaaaccctttttggaaaaagcaagaaaagaaaaaaaaaagtttctttttcaaaatagctcagacacccacctttctgaaacctaaactttttctaactaattttaatttttgtacctgttactttgactactgtttttttcttagcacttgttattatgtttcctgtacaacattagtggattactaaatgtttctcactggtgccctcacgtaaattccatcaaagtgaattgtttttggctcttaatcattatgtttttaggcggctcttaatcaccatgtcagtgcacagttgctcagcacatactgaatggctgtgaaaacatttccaagggaagtttctccaagtacagtgcattgagaattgattcgagttaaaagcttatttgctgggcttttgagatggctccatgggagtcaacatgtctgacaccaagcctgatgacctgagttcaatccccagggttcacgtggtggaaggagagaagtcatatcctcaagctggcttctgactcccacatgagtgctgtggtgtgaaaccacccccaacaaaaccaataagtaaatgtaagaaaaaaattaaaaagcttattgtccattgctgtgatgagactccattggtagggcgacacatcatacaaagtgttcagttgggctttcagtctcagagggttagtgtccatgatggagagggggagacatgatggcagcaagtgctcacatccgaagatgaggaggtagagacctcaaagccagtaacacacatcctctacaagacctaatccctcctccaccaactgggcaccaagtttgcaaatgtatgagctataggggccattctcattcagatcgccacacttatctttgcttgttcaaagtaggtagcactcactgagtagtttggtttcatatttctttctagttttgcattcccagtatatgtaaatgagtaagttaacttaagatctgtacaaatactgatacgctagtttgaggtctcaccatcagagtctcacacttaaaactggtgacaatttagatgacagtttaggccaattgagatgacgaaaatccagtgacaagatggaaaagatttcagaacaccttaaagttaatcatgtaattcggggctgtagagatgtctcagcagttaagaatacttgttgctattattgcaacaactttgattcccatcactctcatgatggctaactgtccttaattccagttcccgatttgatgtcctcttgtggcccccatgggcaccaggtatacgaatgtatgcacagacaggcaaaccaccatacaaaagaaagaaaggaaggaagaaagaaagaaagaaagaaagaaagaaaataaaagaatggctcatggtcacagagctctaacatagcaatggccaggacttcaacccactagttaaacttcatggctcctttgccacactgacccttctagttaggataatggaacccatttaaaagaaggccccaaatcagaatttccatatgcaagttactgtctttcaaagctatcacggaaaagcatacaatcattccagtgacaataaggcgctgagatactcagtggctaattcatcacacaaatactatttagtgcctgtgaacaggcaggtgctcacggtgtcataaggatttagagttaaaataggcaatatatatgtgtgtgtgtgtatgagatatatatctcacagcatacacacacacacacacacacacacacacacacacacacacacactgctgtgagatacaagatccgaattactgctcatgatagcagaggtaggctgtctgtagcatttctggatgtgggttgtggtcaaggagcaccccttcgggaaagtactgctgcagtaagatcagtaaggaatggttgcaagttacagagaagggaaatgaaggccctgtgtgtgggataatgaaccagatggagagacagtggagactgactggactgtgcatggctttgtaggttttctcagacttctgaatttgtcccaaggtcatagactttaaaggtattcctagacagggatagcatgaccaactctgcattttaagaatgccaccctgtctgaatgtggagatgctgagtaggtgctgagagctaagtggagagatcactgtgatgtcccagctgcagatggcgaagtgagtagcagtgattgaagacagattccaaggagagaacttaaagctggtgtggtagccatgactaatcctagcacttgggaagtggaagccagaggatcaaaagttataagcaagatcaaggccagggtggctgcatgagacctgaagaggaacaaacttgtttcatgtgtggtgctggtaccttgggactcacacaggccaggcaaacactatgtgtctgagcattggactcacacaggccaggcaaacactgtgtctgagccttgaacctgatacatgctgggcaagcactgtgtctccaggcaatccctaggccccatttttaactctttgacacagggtctcaccaagtgatccaggttggtcttgaattcactctgtagctcaggctggtcatgaacttgtgatccttctgcctcagcctcccaagtagctgggattatgggttagttgtgtgacccaaaagacaatctgtaatctgtaaggtggagatatctttattgagataaataccagccaaacgcagtcagagcttgccaggggcagctgagcagccaggccagagagaaggggcaggagagggagtttccatgttctctcggtcccttaacagcccacgcctgacctcaccttgaccacaccttgacaggcatggtcaggcacaccagcctctaacaggcgtggcttactgtcccctacaatgggtctaaccctcaccaggtcagctcaataaagaaaactcaataggcatgtttttacattctcagtgaccagtgaatttgactttaaagttagtgtccagtaattcagaactggtctcttttggcaccatctggccctgggagctttctgcaaagctgcaaacatgtgctcagcagtgacagtgtcattcaagacatggtgcagctaactcaaaacgacaactcaaaatagacagttctttccttagcaaaaataatttcagctgtattctcaggagcaggccctggtgtcaacaccacagcactgaaggacacacttgtgtgtctgacttatgtgtgacaatcgagctttaagcaatataaaagaaacatgtcaaaacatttatctacttccatgcagaatatattattaaattcagtcttctgctaggtccacagtagaagaaataatttacttgcttagtgtttccacagtgatttgttaacgaatgaaaaccaaagtaaaccacctctccctaatacaataccaatggtgatgtttttcaagataattagagctggacatggtggtgtgtgtcttaagtcccagctgcaaaatgtgcttgggcaacatagtgagaatttgtctccaacaaaaacaatataaaaggcctggtaactgatctgtagtgtatctcctgaaagcttagtggaaactgtaattcttgaaaacatttaaaaagaaattttttttgaaacaggttctctccatgtagaacagggtggccttgaacgcacagaaatgtacctggctctgctgggtcccaagtgctgggattaaaggagtgcaccaccagacctggatataaaagcatattacttttatttatttgtgtgtgtgtgctgtagtcagaggacaagtgacaggagtaatttctctcctggcaccatgtgggtcctgaggctgaagctcagattgcccggctgggcaccaagcacttcttacctgctgagccatctcaccagtccccctgaaacattttacatacaattaactatcaactcatattaaagaaatgagaatgcagatattaaatttcatagatcgatttatttagaattacaaatattaagaataaaagatttatgcatttcttaattaacataacagtttagctaaatataaactctgcactaaagatctgcagtggcccaataccaacaaagaacacggaagcgcttttaaactatacaaaaatttcaaatggaaaataatcttatttcagttttattatacattaatttacaaaaagtctcattttatgagacgtcaaagaatcagaatcacctctatagttatattttaaactccaaatctgaaaacaattatattttggctttataataatctatattaaaacaaaaattttaaaatacatactttttacaagattattttcggcaggttttttcttaaaaaaaaaaaaaaaagaaaaaacaaaaccaaacaagaaaaaactaaaacaaaacctccctctgtaattcacaccggtcatatgctttccttataaaatatttttactttataaattgtgtactgttggattttaaccagtaatctggtttaaagttgtgcaaataaacaaaaaatatgaaaatagtgtgttatcagtcttttttcttaaaataaatctaacaatagcacttttcgccctgaatcatggaaaggcatgccaagtccactcgctgaaatccagcggcctacaatacagttcttcccactccttcattttcttctactgataaacaacgttttataaattatgataaattaaaatagttattattataaattgatctatagaaccatgtcatactgtcagtatatgcaacatatacttaagtctctgtttcccatccatcttccagtggcttccttaacaccaggacgacttcccacactcacgatgtaaattttgaagcctgagatataatgatcaacgaaatccactggaccggtgatttttcagatggattccgtcacgcatggaaaagaccatgcctctttgtgttctctgtcacaggagttgtttgcatgtgctgagcagaattcatgcatgtataaaaaaatggtgagcacgctcctccatgaaatagtatgttcagatagttttaggttaaaaatatttgctgataaacatgaaatgtaagcaacactactgcatctggatagtaaaagaagaataaataaatgctggtcagcacaatgctggtttaaggagcagtgcagtgtattagaagccatgtctggagacgcacagttccctcgttttccagcagacaggttaactggtgttggaaacttagattaatgagaaggactcctcagaccaaggtcttgtgcagttgggtaccaggtctcctgtgctcagtctctgttggtgttgttggccgcaaaggcatgtaagtttcccatctggcttaggccactctggatatgtgcaacatggatttctacattattctgaaaacaactaaagaaagagaaaataaggttaactatcacaacattaagaaaaacaaaaactaagtctattagtttatagtgtgtgtgccatggcagtcagaggataactgtgtgcagtctgatctttctgtctgctttcatttgggctctggggaccaagcacacggatccaagcttatatggcaaatgcttctgcccactcagccatcttgacagccctaaaacttactcgtttattactgtgtgtgtgcatgcatgcccaggttcacatgtagaggttagaagacaactctgttgtttctctacatccacctttatgtgggttctggggattgaattcaggtggccaagcaagcaagggcaagtgccattacctgctgagacatctcatgacctcaagaaaagctttttttccccttctctcctaagggaggcttaattttagttagtaaatagttgtttcttagaaaacagctaagaaaatgcctttagggaagaaacagatctgtttcagtgattgtgggaaagtatacttagaagcaaaggagtgtcagggctactgaagctgttgttaagtctacaacaaatcaaaaaccaaacgttatgtcctgatgccttcctacagagagcttgtgtgaaatgtctgttctgtcaacagaattgaatataagtgaaaaagtctttttaaatatatttaagggataaacaaatacacaaatacttcacaaataaacaaaattcttaaaacctctaccaaaatgtcactatgaatttaacataaaatagttatcgtatatctaattacctgatattagaagcatctattgtattcttgatgtcatttaatgaatctgtgagtgatttgaattcaaaggaattcaggtctcctccctctgctagacactacagggaaaaaaatgtttcaaaatttaattaaattttagcttaaatacagacatacataggaacaaattaatacagtgtgcttagtataaaaaaaaaaaactataaacctattttctctgaaatttaccttaatttgtaataaaatagcagtaagcctggcgattaaatccgtcagattttcattttcaacacacggatgtcctgaggaggagttggcttgccggacgatttcctgggcttcttcctcacaccttcgtctcaagtctgttggctgatcagcaggctggagtccctggtctggtgcaagctgaacagggaggagtaaaacacaagatctactctgacaagactgtgtggggcacggcacacatgtatcatggcacacacgcgggagtcaaaggacacctggggaatcacttctctcctaccacctgggagctgggtgataccctccacacaggctgtgtgagctgtcattagactgaacttgcacgtttccggcaggagaaccacagtgtgatgcagagcccttctcggtatcactactgggaggcatccagtgctcatctagctcatcactagtgagatgtgtttctctactgtgaagtagtgaagaatctgccacatctccacatagtaaagatctccactttgtaatcagtactcatgagaagactctgaggctacataaagctcctatctggcatcacacttttctttaccagtctgagcatccattgatgagccttgcttatatcaatcattactatggtcattgtcaaatgttacgtttattttggttttttgagacagggtttctctgtgcagctctggctgtcccagactggctctgtgtcccaagtactgggattaaagatgtataccaccactacctgatgttcatttatttttaatagtttatttatttttctgtgcactggtgttttgtctgcatatatatctatgtgagggtgttggactctggagttggagacagttgtgagctatgtgggtgctgggaattgaacccaggtcctctgcaagagcagtaagtgctttaaccaccaagccatatctccagccctgtgtgtcttttcttgattagtgaccagcaatttccagggctgcctggcagagggcagccccagcctgacttccagcctcatgggccagctggtggtggtgtttgaacacgtaaaatggaatcatacagtttttattcttttgtgtctgaattgttcaaagagctgaacagtaattgaattctgtaattttcattgcaggtaacacaccactgtgtaatgatagcacatttattgatctatcctagtatttatgggtatctgtagtttctgaaatttttatatttatttatttatttatttattgtttttttgttttgttttgttttgtttttgagacagggtttctttgtgtgtgcctggctggcctagcacttgatctgtagaccaggctggccttgaattcagagatccagggtgctgggattaaagatgtgcaccaccaccacccccagttttttcccctgatttcttaaaaaaaaattattttatggacaagtactggtggtgaacgcactcaggaggcagagacaggtggatctctgtgagtttgaggccagcctggtctacagagagagttccaggacagcctccaaagctacacagagaaaccctatgtcaaaacaaaccaaaccaaacaaacaaacagaaaacatttttcaatttaatttatgtgtatgttttggctacttgtatgcctgatccagatgggggtgtcagatcccttggaactggctgtgaacctccatgtgggtcctgggaaacaaactgggccctctagaagagcagatagtgcttttaactactgagccatcgctgcagccccaaatttctgatttccaaattttacctatttattttggtatccagtttctgattatgggtgctaataagaaatgaacattctagtacattccttttggtaaatacatgttgtctgtgtatactaaggaataaactgccaagtcatagagcgctggtttattgtttctttaaatcaatgctctacttcaagagctttgtggaaatcaattcatttcacttgagtgggaaagaagcctattgcaaatgcccttgggcactccacaaagactgtgtaagcctcatctttatgtgcccttttgttacagaagtctcttaagccctgtggtctatacttctggagagttgctagttggagtaggaaatctatttactagaacaaatcactgataggcagcagacgactgtcagaaaattagaaataaataatgatacagctaagcacagtggaatatacctgtaatcctagcacttaggaagtggaggtgggaagactgtgagttcaagtccagcctgggctgcagagtaatactgtattattaaaacccagggactaggaatttagctcagtggcaaagaacttacccagaacatacaaaaccctggttatgtcattatcggaaacttgaagtgtgggatggaaaggggtgtgtgagtgagagtggaaggctaaaataacagcataggtgatcacagttcattctgtttagttcaagtagctagacatcataatctacggcagatttttgggacttaccaatatggtgattggaatctcctatcaataatataggagcttcactagaaacacagtttcaaagaattcaagggcagaaaaattctaaaatcaccacaataatttaatacttcataataaaagcctcaaattttagatgatggtttaactactttattatttataattacatgtgaatgaaaaatttcctaaactcctgggattgtatacctgaaatctaagattcacagttctaagacacagttgaaggaagaggaaacagaataatacagggtatgattgctgagagaatgcatgctgtttaaaaagggccggggttagctgggtggtggcggcacacgcctttagtgtcagcactcaggaggcagaggcaggtggatggatctctgtgagtttaagaccagcctgatctatagagaaaattacaggacagccagggctacacagagaaatgtcatgaaaaccaggaaaaaaaagggggtgctgtcgagatggctcagtggtttagagcattgttttcgcagtggtttcaggtttagttcccagcatgcacatggtgactcataaccatctgtagctcagttccaggaaacccaaagccctcttctgacttctggaggcactgggcatacacatggtgcacatatatacatgcagacaaaatacttatacacataaacaaacaaacaaacaaacaaacaaacaaacaaacaaataagcaagcctaagggaggcggctggagggatggctgagcggttaagtgcacttgctcttgcagaggacctggtttcagtctccagcacccatggtggctaataacagtctataacttcagttcctgaggatctgacaccttctctggcctccaatggcaccaggtacacacatggtgaagaagagtaaatacaggcaaaaacacccatatattaaaaaaaaaaaaaaaaaagatcatggtaaccaaaaatatggtttctgggatagtggagtaagaataattgttctggcatgcatggcggttgcatgtctataatccagcacttgggctagagaaggctgaggcagcagaattatgagttcaaggttaacctaaactatgtagcaagatacatagaaagaaaatgaaacaaaggactggggagatggcacagccaaggaagtgctagcggtacaaacacgaacgcctgagtttgatccttaaaacccatgtaacaagcaggtgtgacagtatatgcttgtgatcccagtgttgggaggcagaaagagaagcctaattagcgagccctgagtcccagggacatcctgtttgataaaacaaggtagatagttcctgaggaatgacacctgaaactgactgctcactctggtacccattagcccttgcccctaacaaatgaacagaagcaagcatgagcgtgtgcaaacaaaagataattagttttctggatgctgacttcgaagttcattttttttttgatagaacaatatcacttataatttagtaattgaaaattgatagttcactatacataaaatactcttaatactgatatgagtaaatgtatttgttaaaatatagctttgctaaaagaccttttaaacatccgtgttaatgtagagcctgtaagaggtaacagtgaaagcattaaatttcagataatgaaacatggagggaaagtaaaacaattcaggctgggcatgatagcatagcacacctttaatcccagcacttgggaggcagagatctctgtgagttccaggtcagcttagagtaagttccaggtcagtcataactataaagtaaaaccttgtttcaaaaaaacaaaaaaaagcaatgcaaaccacttacctcatagcagtactgctgaactttatgcaaaactttgtttaggtctttgttcaactgctcaagctctagaacaattgttgcgtatctccgttgaaattcaatactaatgggcatggaatatgatttctaagaagaaaaaaaatcttaataaggttttggctggttaacaatgcaatttcaacaatctaagagatctaaaacacccagcaggttgttacattagcctacggccagtgataccattctgtgataatggtgttagtggtattaggagactgtccttgttcatagaaatgcttgatgtctgccatttactcttttctctcctttgtatttatttgattgctttaaattatgtgagtgtggctgggcagtggtggcgcacgcctttaaccccagcacttgggaggcagaggtaggcagatctctgtgagttccaggccagtctggtctatagaatgagtggcttaccctctcactgaagaatgtatggacacttccttgcataccaaccaatactctatacatgaagatggagagttaaagggtcactcttcacacactgtatttttttttttttttttttggtttttcgagacagggtttctctgtggctttagagcctgtcctggaactagctcttgtagaccaggctggtctccaactcacagagatccgcctgtctctgcctccagagtgctgggattaaaggcatgtgtcaccaatgcctggcttcacacactgtattttttaagattttagttttatgtgtatgggtattttgatgtctctgcatcacacgtggcagttcccctggaagccagaagaggaaaccagaggaataaggggcaccgtgtcatgcagcatgttgactgacaggttgttctttagaatgagtgggggaagagttctgtcagacgatgtgtgaacttgctaaatgccagaatgaagtcacaaaggtgaaacttcatgctggaaagtttaaagtcatatggctggggtacagctcaacaatcgggtgctggctcgcatatgtgagggcctgggcccaatcccccgtgtagggggacaattgtaactttggctggcctagtatatgctacatacaccaggctggtcttgaactcaagaaatcttcaggcctctgcctcctgagcactggaattaaaggcatgtgctaccatgcctgacattatcatcttgggtttttaaaaataatttatttatttttattttatgtacattggcattttgccatcatgtacatctgtgtgagggcatcagatcccctggaacaggagttaagacagttgtgagctgctgtggacgctgggaatcgaacctgggtcctcgggaaaagcagcagtacctcctaattgttgagtcatctctctagcccatcatcttgttttttaatgtttttgttttaactgaagttttaataaaaattgcacaaacatatacaattcaatggattactacatagtaatcacacctgtgtaaaaacatgtttaattctcataaacatgccaagagaaataaaaacacttatctacgcaaagacttatagacaaatgttcacagcaattttagagaaattggaaaaaaatccaagtgctcatttgtagatgaatggataaattgtgtcatactcataaagcaaggtgctattcaatagtaaaaagaggaacttcggaggttcagctcagtggtacaagtgcaaggccctggatttgatcattagcattgaagggaaaaagcaactgtgtattctgaatcctgttactaggtaagtgtatctcaaacttgttatgctgaaaccaggcatgaaaagagctcaggcagactgtataattctatttttacaaaattctagaaaatataaactaattttaacccacgatgataggcagcatatcaatggctgcctagaaatcaggaagagattaccaaaggaaattttagaatagcagtaaacaattttcacttttagtagagcatatggtaatgggttcacaggcatatgatcaaattgtatatttcaagcaagcacagttgactgagcatcaattctatctcaataaaattagggaaactagccaggcagtgtggcacacgcctttaatcccagcactgaggaggcagaggaagaggcaggcagatctctatgagttcaaggccagcctggtctacgagctagttccagggcagccaaggctacacaaagaaatgctgcctcaaaaaacaaaacaggactggagagatagctcagaggttaagagcactgcctgctcttccagaggttctgagttcaattcccagaaaccacatggtggctcacagccatctataatgagatctggtgccctcttctggcctgtagagatatatgcaagcaaatactgtatacataataaataaataaatattaaaaaagaatcacgattggagaaaaatatgcttaaaaaaacaacaacaaacaaaaattagggcaactattaatagggaaacccatctaggccaattaagagaacaccaacatcctataaccctatctgtgttatttctattttctctctccagaggagccattaccacataaccataaattcatagttttgtattaactttatttcataaaatacagcacaacagaatatattatttgcgttttgcatcttgatatgtggccctgggtagtcaggagcttactgtataaagcaggctgtcctgggaccgccaatggttctctccccttttcccctaagcactagagttagggctgagccaccactggtcagattcacccccactgcaaatatgcacatcagctcctctgttgctgcacagtgctccttacagaaaccagtgatgcacagtcatgccggcatccgggctgcttctaatgtaaggcatttcaacactactgtcgtgaacacttcatacacatatggctgattttttatggacaaaattatggacaaaataggaagttttaacttgtcaaattttcacccatctttgggattaagtctttaatagacatacatgctgactaaacacccatacacataaaataaaaaattttaaaataaacaaactctaaaagagaatgaacgttatctgtgcactcacattactctggtcattaacagagatgagctccagggttttggaaaaagtctcacttattacccacaatcgtgttgcctccacctctgtgccatcattagagatgtgtgctagcacagctggctgcaaagctgactatcgtcttaagacatcttggaggcacagtcgactgtctttctgtatggaagtccctgtctgtctagcaggctgcacatctcgtgattgctggtgcacagctggaaatgtttcctctgaccctgtggtttgcctttcagttcttgttcttctctattatgttcaaccaagatacttaatttcaatgtaggttaatccagcaatcttttccttgatggtttctgtttctgtatttacttagtctaaggagccctattctaaagtcataaatataatcacttacagtctcttcaatttttttttttttttttttttttgtgtgtgtgtgtttcaagacagggtctctctgtatgtagttccagttgtcctggaactcactctatagaccaggctggtctggaactcacagagatctgcctgcctctgcctcccgagtgctgggattaaaagtgtgcgccaccaacgccccgacccagtctcttaagttttcatagctccactttgcacttctaggtttaaatctgcagtcattctgtctataggataaagtagaggctaaatcatcatcacttcctccagcactgtggtattcagttttcccagctactagagtcttcagttgctctactactgaggcatgtacgtctgtgaaccatgtgcatgcctagtgcccaggaaggccagaagagtgtcagatcccctgaaaccagagctacagatggttctgaagccccatgtaggtgctaggaatcaaatccagaccctgtggaagagcagccagtgctcttaaccacttagtcatctctccagccccatatgcttaagatgtatttcagtagtctaaaatagaaaacacatattgaagttaacaagctcaaacattgactaacttaccagtactgtataatttgatccaaaaaatctagttcaaatacatactctgaaaaacttcatcaaattttctgggggttgggaagatggctcacttggtaaaaaaacttgttgcacaagcattaggacctgaatgtgtatccctagcacactcactgtcttgaaataccaacactgggtgggcaaagacaggcagatccctggaattagcctggacccatgagctccagattcaccaagaaaccagaccctatcttcagacatacaatattgtggagagtgagcaagacacctcacattggactctggtctccaaacatgtgtacacatatatgcacgtgcacatacatgtcaacatgaacagacatacaacacacgcacgcacgcacacatactccaaaacatttttttgttgttgttgttttttgtttttcgagacagggtttctctgtggctttggaggctgtcctggaactagctcttgtagaccaggctggcctcaaactcacagagatccctgcctctgcctcccaagtgctgggactaaaggcgtgtgccaccaccgcccggcccatttttttttttttttctggattaaaaggaaactgtaacagatgaattttctttgtaagaataaagtactatgtccaatcctttgaggtgaaaaacagtgaagtactcaaattatttggtaaaattaaacataaacataagcttttaacttaaatcactgaaaagaaagattaaatatttgtgagtgtagaggctagataaggctagggtagataaaaatcactactagttagtattgaaacacctggttagaagtaactgacatttagtgagtttttgttttttgttttttcaagacagggtttctctgtggagttctggaactcacactgtagaccaggctggccttgtcctcagagatccacctgcctctgcctcccaagagctaggattaaaggcctggctagttcagtgttttctacttgaagttcccagaaaaggaaagaaaaaaaaaaaaaaaaacaaaaaacttgattatacctttgatactcttagttcgaagtgcctaaaaaatcagtacaattagcagagtatttattgattgtgtccctggtcttttgaacaattcaggtgttatcgttttcattacagaagagggtgaataggattttctttttttggaaacatatactattccataaaaatttaatacctcttgccttactttatcctatatatatgaatctaagtttgtgttttgtttgtttatttatacctgctagggactgaacatccacctgctcacccacccaccaacccaccaatctacccacccacccacccacctacctatttctgttatggtttgaacccaggttcccactgagctataccccaatcccaggttgtattttcaatgccttgataagaaaataatcttgctgactgtggttgctcatatttttaattccagcactctgaggcagaggcagatgaatatctgagtttgaggccagcctgggcttgatgaaagttacttttttttttttttttttttttttttggtttttcaagacagggtttctctgtggctttggaggctgtcctggatctagctcttgtagaccaggatggtctcgaactcacagagatccgcctgtctctgcctcctgagtgctgggattaaaggagtgtgacaccaacacctggcttttaaagagtatttttaaagagttacttttaaagagtatttttatgtaaataatgacctggggtcagttctgagcacatatgttgggcagctccagtatctctgacaacctgtgctggactccaggtatgtctatatgcacatggcatagactcacacagacacaggcagacaatctcaaaaagcccaacactttttggctagagagatggctcagaggttaagagcactgcccgttcttccagaggtcctgagttcaattcccagcaaccacatggtggctcacaaccatccgtaatgagatcaggtgcccacttctgacctgcatcgatacatgcagacagaacactctatacataataaataaataaataaataaatcttaaaacaaaaacccaacacttcattttttcttacaaataaaattgactcaacttttgggacttatctgattaataaaatctttgtcaaattaacttaaacatgacaacttagctactttcttctgaagcacttttaaaaagctgtcattaaatcttccttagtgagatgtattaattagtcctaagaattctacattcatgtaaatcatccacaaaaccaatccactcattaatcctgtacaactgtgtagtcagtggtctaacaggtaaggaactgcttcacaatgctaacatgtattgaatatagtaagaaaaggtgaaatgaaataatgatttaaagtaatatttattgcaagccaggtgaggtggcacatgcctgtggtcccagcaccaggaggcaaatgcaggaggctagttggaagctagcctggtctatatagtacatttcaggccagccagggaaacagagcaaggcctggtctcaaacaaaaacaaagatgcctcaaagcttttttcctccagaaggtatttaaaaaaaaaaaaattagaaggcctcactactttaaaattagacacataaacaaagggaaataaatccttaccagtttttctgcttctgtgttcatttcccttaatttcttgatatgttcttttttaatcatgagaatttttgataatttagtctgtagacaaaagagaaatgttttggaataaatagggacatttaggtgtatcaaatttccagttttcactaatatgttctaatggtacagtttagtctcaatataatcatgacaaagcattttgttttacacatgtgaatagcaagcttaggatacacattcgatttcagcactcaggatgctgaagcaggagggccacacgtttaggccatctgaggctccataacaagtcccagggcagcctcatctacataatgacaccctgacttatgaaagaaatatgacctgggcagtgctggcgcacacctttaatcccagcacttgggaggcagaggcaggcagatctctgtgagttcaaggccagtctggtctatgagtgagttccaggacatgctccaaagctacagagaaaccctattttgaaacataaacaacaagaaaaatatgactttaaaaatctactgtatttagaggtggtgagatatactaccaagcctgaccacctgagtttgataccctgtactcacatggtggagggagagaactaagttatttgttttttgttttcaaaacagggtttctctgtgtagctttggctagaactcattatgtagactaggccggcctcaaactcagagatctgcccgtctctgcctcctgaatgctgggattaaaggtgtgtgccatcacctggcaaggaattaactcttcaaagttgccttctgacttagaagctagaccatgctcgtgtgccaattccctataagtcattgatgaaggaggaagggagggaagagagaacgagtaacaacacaaaatgacagcaatgcaaaatgaggctgggccccgtcacacgcgcgggtcttctgcgcatgtgcacagccacgtggctatgtgagagttaaaataatcgggctactgggatgactcagtgggtaaaggtgcttgctatcaaacctgctgaccagagctcaatccccggaacccatatggtggaatgagagaaccgacttcctaaagttatttgcactgtgacacatggtgtcctcatctacccatccctctagcccacacaaaataaataaaaatgtaatgataaataatcttaagtctactgtaatcaggatatggaaaaaaggattgaggggttaatctgggaaatttaggtacaaagttcagagtcccactacctgtccctctggttctgtggaccagcacctgctcacctaggacagattagtgggtcaggccccagcagtgtccctatctggtttccccaggtgtctctgctacaatgaaagcagtcaaaaagctccagctgccaggctcaactgtgtgaaggttttccaggcaagatgaagatttgaaataatctgtctatagaaggctcaacatgactgcagggagacagtaggtacaaatccttcagacccaatgtctactcctttctgtagtcaagtctttcagacatttcccaaacctctttgcctgacccagaaagtagtcaagagaactacacacgaagcctgtacaaggcttcctaaccctactctctgcagccctttacacctactacttctctgtatttacatgggtttctacttcacaaaagtgactattttatacactggcagaatacataaaatggtgtaagttttgtaaaaaagtcaatcggaacaaaaactaagaaggaaaatacgaaatttcttgaagttacactttttggtctacagagctagttctaggacagccagagctgttacacagagaaaccctgtctgtaaaaaccaaaaataagtaaataactatgcaagtcaataaggaaataaaagtctgtaagttcacagtgatattttttaaaaaaattaagcagcttaagtacgcagtgctatggtcttcagttgctctactactgtggcacttacacctgtgtaccatgggcatgcctggtacccaggaaggccagaacagagtgtcagatcccctggaactagatgattttaaatcacctgtagggggaaatgctgaccacacccgcttgagggatggcacaggtgacactgatgttcagccaggccagagagggaacagagagccaaatgcctgcctgcctgcctgcgtgcgttcgtgcctcatatttaaagccttgctgcatcaatctgaccatgcccaagtgcatgtggtcaacgtcacctgtgccagccctcaagcgggcgtggtcagcatttcaccctacaattgccaaactcattttgtgaaccaggaagcaaagagaaaacatcaaacacttatttgtgtttctatgcaaattttaccattaagcaacatattagggtaaagccttcctgtattctatccttcccctctttcaaggtatggtcttgccatatagcctgggctggcctggaacctgttgggtaaactagactggctccaaattttcagtgatgcctctgtctcctgagtgcagggagttgcagtcatgtaactgcatgcctgatgtagcttttctttatacaattattttagataacaagcaaagaaagaaaaacagaatgaaatgaccatctcaacaatcttttaaaataaacatctgttcatttctttttaatacttttttattattttatgtgtatcagtgttctgcctgtatgtatgtcctgcatgcaggcagtggctgcagaggccagaaaggatgttagaaccactggaagtggagttacagatggctgtgagtctccatgtcggtactgggaattgaacttgggtcctctgcggaagcagtcagtgctcttaacctctgaaccttttctccagaccccatgtttgcacttgttcagtcgcaaaccctgggacaaacagtcaaggtgcctatttaacacaccaaagtggacctggccacccggttctccctgcatccctcagttcctacctgttacagagtccttctggctggcataccccataacagggaaggactaaggggtgctgggagaacctggtggccaggtccactttgatgttagtgggcatctcagttacccatctgtcctggggtttgagacctaacaacaatataatgaatgaatgaaattactcatcagtgatagccaacaaatgaaataccatagacctatcagtggaacataaaattaactataaagtacaacacccaaccaagagctggggatgttgcccaataggtaaagtgctttcctagtgttcatgggttaaagtcccagcatcacatacatcaggcattgtagtctgcaatcccagtagtgtggaagtggggaccgtaagatcaaggtcattcttggctacacgacaaattccagcccagcctacaatacatgtggacttcagaaaaaaaaaaaaagtacaacattcatacaaaacaaccaaaggatttatgtgagggggagccacaaacctaaccaaacctctagatcccattaccaacttacttaatatagctacagaaaaacctacacatagatgtggtgacatcttgcttgtacaaataaagcctgtctgaggctcagagaatggaacttgaaacttccatctacacatagatctttagggcagaatcataatttacaattgccaaaacctggaagcaatcaagacgtttttagtgagtgaatggacacacagcagcacatccatccaataccctatcattcagggctataaggacatgagatgtcaaactatcagaagacacaggagaaacataaacgcatattctgctcaccatttctttcaggcacaggcacaacaccccaaatcccttaagcctgagctggggataggggtaccactgtcgtcctatgctgagcttgggggataaagccctggcagtttcaaatatttcagggagattcttgtccccctccccttgcctaccagacactaaactagagaccataaaacagtggaaagtcaaaactcccacaggaatcagcatgctggagaaagggaaagcctaagaagacctggttccagtgggccaggcaggggaagaaactgtacacagctatgacggctgatctcacagtaaaattaccaagaacatttcctctggctttagtttcatcttttctgtcttcttgtttgcttctttgttctgttttgtttttctcaagatagggtttttctgtgtatctctgctgtcttcgaacatacagagtctcctgcctctgcttcctgagtgctgggattaaaggcgtgcacctccacttcctggctagttccttcttttctacagaactgtaacactgcatcaggaagggcagaaagaaagtaggagtgtttcccaggtttgcccaaagtataaataaaaccatgtatgttccttcatcaatttgtttccttttgttttttcaatacagagaaactagttacagcatagcaattagcaacaaaaagagtttgtccaaactcttaaaatactcaaaaccaagagggaaccctcactacaatatagttttaggtgacgatgataacaatagaggctcactgtaacaaatgtaccactttggtaaagctaagctcattaatcatgggtaaggtggggggcacaggggtatctttacagtcctcttggttatgaacctaaaactgccccaccccctgcccccacacccaaaaacatccacaaaaaataaaatacttaagcaccaataatgctattggtacagcagacagtgggaaaatgcatgctgaggctcccttggcttacagttctccttgggtatttcttcacagattgttgcaagggacaagtcttgactcaccacctggataaggaattccactggaaagcctcctaatgtctccgtgtcagagccagaaattttacttctccagggtgactgtcctaataaaggatcactatcctgtgggacagaaggaatcatctaatcattgacagtatctttagataaagtgaacattctgtttaattaaaattacattaaatccaataacaaaatatttccagaattgaagcaactatttaaatatctgccaatcaattaaaataatatagatacaggcagcacccaagtcctgacgtagttgtgatgtacgcttcatgacaacagttcatatttgcaatagttacattgctaagggcatttctatattacttactgtaattggtgactgcagaggaggggtataatgtaaccgtggaggggtcataaaaaaccgagaaggccgctgtttttgtccaaaggcagcaattggcattgtctcatgaggttcgttactctttgggaaaagaggataatccataaaacttggagaatttgtaaatattgtatatcaacttgagatatagcatcttaccagcccagattgcagctataattaatttattaattatttactatttatttatttatttggcagtctttagggcctttcacatggcaggcaagcactaccactgagctgtatctccggcagttatttcatttattaaaaaaagcatgtaaggccaaggatgtagctcagtggttcagtgatcaccatgccctgaattcaatccaaacttgggaatgtgaacacacacacacacacacacacacacacacacacacacacacacacacacacacaatttcaacaacattacaaaatgaagactggtaagtacctcaacaggctattatgtgtgttagaacatcaaaagaccaagattctagtctccatttgcctgacaaacaaaacccagcttcagagtcttgaataagctgatgaacattatggcaattttatcatgcaaaaatgaaggtactgggctgctcagtggtccagatatctgccaccaagcctgatggacctcagttaaactcctgggacccaaatagtagaaggacagcattgactcccacaaattgtgctatgacctccaaacaagtgttgtgtggtatgtgtgagcacaagtaacacacacacacaaagaaataaaatttaatttttaaaaatgaaggcatttattctacatacatgtgagaataacatagaagaaaaacccttgaaggttactttatagtttaaatttaggacctagtggctagaatgaaaatgggtagattccaagattatttagtcacaaacagtgattccactatagtaaggtactgtgtggctaaagcacaaaggagaatcctagctttgggctcttctctctagagaagaggattgggaaaccctaagcatgtctttgaattgaaaccttgattctctcataaaagacaatttataagaaaatactacaataattaaaaggcacaaaacacaaatatactataaaaacattttatttaagtttaataaaatattactcacaagaacttcatagtcaggaatggtgtgggtcccaagccctgtcctatcgaaagtgactctgtaagtagcattcagagtgtccacagcgtctatctggccagtgaacaggccatcgtgaacaccacgcaatcgtgctaagaaaagaaacaaaagcattgtaacattagtacatgcaaagaattgtcaaactgttctaagcatgtagtttaaaccataaaaaatagagtgtcactatctactagttttaacatgacagtgtattttattttaggattagagcattaacaaagctttttacacaaaaacaagtcaattcctaatttgatacataaatgaagtcatatagctaccaaacagactaaataaagatcacaatttaaagtgtgaaccctaaaaaagtaacaaaataactctggatatcatactttttgtttgttttgagacagggtttctctatgtagctctggttgtatggaactagaccaggctggcctggaattcacagagatctacttgcctctgctaagattataagtgtgagccaccactcctggctggatatcacactttttttttttttttaagattttatttatttattatgtatacaacattctgcttccatgtatatctgcacaccagaagagggcaccagatctcataacagatggttgtgagccaccatgtggttgctgggaattgaactcaggacctctggaagagcagtcagtgctcttaacctctgagccatctctccagcccctggatatcacacttttaagtgacacattaggagtagtttattttcaactttattttataatttatttatttattttatgtgcattggtgttttgcctgcatgtttgtctgtgtgagggtgtcagatcccctaacaacaggggatacagacagttgtgagctgtcatgaggtcgctgggaattgaaaccgggtcctctggaaaagcagtcagtgctcttaactgctgagccacttctccagaaactagggagacataaagactgaaataagttctcattcatctctagctgactgggaagctatgcaaatgagcagcaaagaaccaacagagcctgcagaaagcaaaagttaaagacttgaaaactagcaacaactttgcacaaatcagtgtgaggtctttcaaacctctgtccacaggctcaccactgaactatatagaaacagcagtcacacattgggaattagattaaaaataagcattaaaaaattggagacgacaaaatactagaaagatggctcaacggttaaaagcactgattctagaggacccaagtttagctgccagatcttcacatgactgctcacaaccatccttaactccagttccaggggatctgatgctctcttctacttctgaggacactgctcacacttggtgcacagacacacatgaaggcaaaagaatcatatacattaaataataataaaagaaagaaagaaaatggagaagacaggccagtgattgcaaaggcaaactactatagcaaatttaaccacactgtaaaacaacagtatagatttaccatagtatcatgttttcttttttcttttttggttttttgagacagggtatctctgtggctttggaggctgtcctggaactagctcttgtagaccaggctagtctcgaaactcacagagatccacctgcctctgcctcctgagtgctgggatcaaaggcgtgcaccaccaatgcccggcagtatcatgttttcaaccaaaaattactagatatattaactatgaaatatgattctaactcaggaaaacatacacagcaaggaacagtgaatatgtgtgaatgtaataaaatatactgtatgcatgtataaaattatcaaagaataaaaataaatgagagatggctcagtggttaagatcacctgttgctcttggagaagatccaggtttggttcccagcacctacatagcggctaacaactgtctatgactttagtctcaagggatccaacattctcttctggactctgacggcattaaacataagcatacatgctagagaagtacttcccagtaaactatatccccaaccctttcctatttgagacactgtcttgctatgtaggtaggccagactgacctcaggtttccatggagctggggttatgggactttgccactatgcctggctactttagttcatactgtggtggacactactgaactaatatatagtttttaatgcacttacttttattttatgtgtaggagtgtttgtctacatgcctctatgtgtatcacatgcatgcctggttgcgttcacaggccggaagtgggcaacagatccccctggacaggttgtgagctgctgtgaagatactgggaactgaacccaacacctttgcaaaagctgcaagtgcttttaaccactgagccagctcttcagcccattaatatttctttactatagtgaattgctacagaaccagagttatagttactaaacttgtaatagatgcaatcttggctacaactttcaagtgattcctaacaacctagttttcacttacctgtaactttggttccaataaccaggggtagaggaatttcatctgggagatctttgaattgtgagacatctgcaactttcctttgttgtaatagccggattttctgccgtttctgttttaatgctgatctctcttcctcaaaaaatgcagaagaacatctagaataaattacagacatcatataaaccaagccaggccaggcagtacaagtacacacctgcaattcaaacatatgcactataaatataataaattgtgtttgaagtgtataatcaggtaagttttgggagcctggggagatagctcagtggttaaaatacttattatgcaagcaagactggagtttgaacccccagtacctgtgtgaatgctagttgggtatggaagcttgcctttaactctaacttagtgagataggatcctagaacgaactatttggagtctcagagaatagggtgaggctgggtgtggcggtgcacaactttaatcccggcatgctgaggcagaggcaggtggatctctgagttcaaggcaggtgctgtcaatctttttttttttttttgagatgagtttcttttattgtgattttattgtctccataccaaaagcagcttagaactggatcacctggccctttctttatcgcctcccagttcaaaatgcttgcatctcttaatagccagcatcctcttagatctgcagttgggctcaacacactcaagcctccggtggtgctgtcaatcttaatgactattctaatacttcagctgatacctgataaatgtccttcattttttttgtttttttagactttctttacttgatttctcccatagcaaataaaatttgggggaggggtccggaggatgggagacagggttttcactgttacccacgctggcttggagctcactatataacccatgccagccttggatttagaggttgctaccacatcttttatacatatacaaaatttaggattaactcattataaaaacaactgtgtcgacgggcttggcatgcatatcaatgcagagcaccttgtatgtgtctaatgtgctctaaaacctaagtttgatctcaagcatggaggccaatggggactgacacttttacagtgctgttttaatttacagattaatttaaatcttcatatttgttcatgtatatcatatatttacttttaagttccttcctggtagtttcattgtttcccttcctttttatattgtgactaaatgcaatttcaccattgattctttaaactttttttcatttatttatttgagtgtgtgtgtgtgtgtgtgtgtgtgtgtgtgcgcgcgcgcgcatgcacacaagcacagatacagcatggtgtacaagtggaaatcagagcacagcttatggaggtctgtttctccttccaccatctgggtccccaggactgaagtcaggttgtcaggactggcagtaagtccctttcctgctgagccaccttcctggcttggaccagctgattttttccctaaagtgtgtatgtgcacatgcatgtgtgtatgcatgtgtacacacatgtatgggtgtatacatatgtgtgtttatagaagaggaggtaacacatgctctggaactggagttacagactgttataagctgtcatcaaatccgggtcttctgcaagtgctctcaacaccgaaccatcgctcttgcccctcacttgagtgctgaaattagggtatttctgaaagtttattatattaataatttgtattataacttgacttcttaagcgtacaccacacacacacaaagtcaataaatgtgagaaatatacataagcccttatagcttccttaaatattttccaggacaagtaaacatcttttgggggtagacttggaacatggctcagttagtacagtgcctgaccagcatgtacaaattcctggatttgatctccagtaccacattaacaaaattgggtctaacatttcatacctctattaccaacacttagaaggaagaggcagaaggatgaaaagttcaaggttatgtttggttagacacaccagtttgagtctgaggccaggcagggatacatgagactctgcagatagacagacggacggatggatagataggtagatagcattgggaggagggatggacattaagtaaggaacactggggctggagagatggctcaaagttaagatcactgactgctcttccagatagggcctgagtttaattcccagcaaccccatggtggttcacaaccatctataatgaaatcggatgccctcttctggagtgtaagcacacatgcagggagaacactgtatacatattttttttttttcaaaacagtaatatgttaaaaatctgtgatcagaaaaattgtatattttattctaagtatacaaagctcttatattaaagttcattaatatgatatatttaacatataatcaattattctgaaaagttatgctttggtactagtcatttgaagatttaaaaagttaaggtactgcatgtggttgagcatgtcttcagtcccagcacttgggaggcaaaggcagatggatctttgtacgttcaagaccagtctagtctgtacagtgagttccaggtaagccagagctacatagtgagacctgtctcagaaaaggaaagagccaaggtaatgataataatactattaattatttattaactttaaacaaaaaaagttatttttacctccgtggttttcccattagtcgcctgatttttccccattctactcttgttaattttcgtgttttcaaattaggaaaagattcctttagacatacacagaagtcattatcaccttcaaaaagtggcctgtaaaacagaatgattttattttataggttaatacttaatgtattactttcttaaacaaaatctaaaatatacctttcaaagctgggtatagtgtccatgcctttaattccagcacttgggaagaaaaggcaggagaatcaaaagctcaagaacagcctcagctacatcactatttgtagctacacagtgacaaagcaagctccagaccaacctggattacatgaaaccctgcctcaaaaagcaaaactcacattctgatttttagatcatactaatcacaatgggccagatttctacttctaaatcgtatgtaggtgaaattcaaagggttgaaaactatctaaagtgttaagtcattcaggaaatccatctagatcagaggttacaggagacggggtagtttgctcagatctccatctgggactatcctctggttccagcattacatttgataaagacaaacaatattaaccacaaagtatctttgccccaaaggaaaagccaaggagccctgtcctctttgggattaaccaagtcttagaacactggagcactctagaggattgggtagttttggtcactcccaaaataatctcaccaagtccatcaaaaaattctactcatgtgtttgaaagatgaaagttcaggttttaacaatgacgcatacttgtgaatacccacgaactccacaagcttctgagcaagcaactgtttttggaggacagaagggaaacgcagatcaatagccaaccaagcaaccacccataacgaacgggcacagagacggatgagagtcagaggtgttcttcaataaacctactgtgtagtacttggatttcagccaatcttgatgtgccactcaaaattcctgtataaagtgtctaaatactggctgtaaatgaaatgatgactctcctacaaatgatgtgtccatttctccagctttgtaaaacaaatctcactgtttgcaggtgatggtgttttgatgtagggtctcttcattctgtggtagtggctagttatgatatggaaattatgctttcatttaaaacttctcacaaaatgtgtaacttcttacagggaaaactaatagaaataggaatgaagtaaactggaataaggaatagagaaatggactctacactgggcatggtggcacacccttgtactcagctactttagagacccaggaagaggaccaactgaagtcatgaggggaggtgagcagatctccagtcaactctaccaggcagtcagagctttaaaacaatcatttgaacccaagaagtcaagacaagtctgagcaacgttaagaccttgtccttgtccctaaaacaaaggattcaaaggaagaaaaaaaggggtgagatggggtggctagagagccaggtcagtagctaagagtctatactgctcttgcagagggcctgggttcaattcctacacacagcagctcacaaccgccaattattactctggctctaggggatcctacactcactgacttctgcgggcactgacacacatatagtgtatataaagtcatgcaggcatgcatacaatacatagtaaataaaaatattttttttaaaaaagagcaaagtagacttacagaagacgtgacagcttataattggaaaaagttaattttcagttcaagcaacattaatgatacaagcagtgatacctacttgtctatatttgaatagaaccactcatatatgcaccatttatgtgctttgggaagcttgagtaggttccgtaatcgaaaaccaatcttctgtgatgctttcttatctggtgttgacattgttgccgtaaatttctacattaaaaaaaaaaaaaaaagatgaattatagcttcattaaataaaagtgaacatttgcaatactaaatgcatttataaaaagctagaacatacttaaatactcaaaaagattcaataatattcaacatggaatttgttaacaagcaaacttcctgataacaaaggtaaaaaagccctcggtctggcaatggggctcaacaggtaaagacatttgctgctaagcctgctgacctgagttcacaggtcagcacatggtggaaggaaagaactgactctcacaagttgtgtacacacacacacacacacacacacacacacacacacacacacacacactttaaaaaaaggttaaagcctcaaattttatattctagaaaggaagtgaaacacttgcttctgctgtatttgaactataatataatttcagtttagctaggcaggaaaaaagatgtagtgaactacttctagacttcatgggtcagaaaaaaaagttaaatctaagtaataatacacatgaaatgcttagtacagcacctgatacatagtaaatactcaataaatgttggatcttaatacttcttcagctgtggactatgttctttaagtcagcacaggaatacaaagtcctgggttcagttttcattatcagaaaaacagaaggcaaaagcccacccaaacaacaactataaaaccagacagacaaaatgaagacttcgaggagatgacttgaaggggaaagaaatgagctacatcacataaatgacaacaataaactagggctgttaggactaaggaagagaaatgtgggtgtaaattttttttttttttacatatttaaggatgtcatgtcttttatttgtcctgtgttctttgttctaattgatcagaagtagaaaagactgtaaatcagtcctaggagatatgcctggaaagcagccatggttagagctgggtcaagacacctccagtgataaagaccaaacttttggttatatttgcaacttacccagactattatagtaacacagctttgttaaagcctaacaacttacctagttttttaaaacccaatttatttatttttaatttatatgcactggtgttttgtctgcatgtatgtctgtgggagggtgtcagatattggagtttcagacaggtatgcgctgccctgtgggtactgggttgaaaccaggtcttctggaagatcggtcagtgctcttaatcattgagcctctctccaggccccttaactagtttttaaatccatttgacactgtgtctaacacctaccaaaccaacacattgcattttgctatcaaaggcatcatattttatttgcttatcaggtatttatatacatttggccttgatgttttaaaagttcaagacatgggtggatggggtgggggggtaggttggaggtggggtagaaggaatgggggtgagggaagggagagggagaggggacttacatgtgaaacaagcctgttccctaacttgaattaataataataataaaaagagaaaaaaatgcaaaacaacaacaacaacaaaaaccccaaaaaacaaaaaaacaaaaaaaaaagttcaagacacattttgttcattctatggaacatgatattttatcattataatcatcacaaagaagttggttgtggtagagcaatcctgtaatcccagtacttgggagtctgaaacaaccaagattaagtctgaggccagcttaggctaaatgctgagttctaagaattgtatggaaaatcctgtcttataacatgttagggaaaataataaaagaataacaggagttatatcagaagttataaagctagtctgagaaaaaccccatagtgttaaaggtcatattttcttggctaagtttcattcctttattacaggcccattatgactttagagttttaaaatgacattcgtttgctttctgagtgtgagtgtgagtgtgagtgtgtgcacgcgtgcccgtgagccacattgtcagaggacaacctgcaggtaggtatcagttctcttcttctgctacctgagttccagtgacagaactcaggttatctggcttgatgacaagagtttttaccctgagcatctcaccagccaaaactttttaagtgtcaaaaataaaataggataaataaaataaaataaaataactcagtggaagagtacttgcctagcatatgagacatcctagatttgatccacagcacccctcccccaaaataataaataataaataaacaatacaaaaaggaaatcccattttatactgtattgtttcctcttctggaaactttgcatcacacttcgcataacaaagttaaacatttcccttctcacttattttggtgtaaagatcaaatccatattaccaagtctgttttacttagtgtccactaccttcatgcttggagaatcacaactggcttcctacctagtttaagtaaatcaataaacactgaattttctaggttagtaaaaataattgctgagcagcaatactgacttaaagaatgctgttcaaaatgtaacagaataaatatgaactttatctcatcgtacaattactcacatacttcacaggaaacaaacctcgacacacacatacctgtgggatcattgcaactctctggtttctttttggtgactttgtatttatttgcctgtcatcttcatcagaaaagagtcgacttctttttgaatttctgaaaggctatgatggaattttagtttaatgaatgtttctcatttttgttccaagtgcaaattagatctggaaagcacactagattatcagtgtataggactataagtgagtagaataaggcacacaaagccaaaatcaacatcttaaattagcaaattatttaaatatgtatttctgcaatgatgataaacccaaaactagaacccacatctctgtggcacactggcaaccatgcacagagaagataggaaaatatgttttggaattccagctcaaattaagttggttaatattaagaggctactacatgctatctgctgcagagggctgagttagacaaagacactacatcacttgagaagagtatgcctttatagtaaagtatggctttactattatactagatctaatgtcaaaagtttatcaaatttctaactgtaaataaaaatccataatacatgtcagataactgttagctatctttagaactaaaaaccccaagtaccaaaaatatatagtactatcctagcactcaagagccagggccagaggtaggcagatctctgcaaggcaaatactgctcaatgacatgttaaaatgaaaatacctacagttgtgggaacgggaccttgtaaaactatttttgtgctatgtgaacttgtatgcacaaccacacaatttaggaagatcccgcggcttccagggaagctctgcttaccatttctacagcagggcctgcattcctgcctttccaaacaggagttttctgtaaagaactatacttttcattccatgtgttagataagcttccctctgtaacaaataattgatactgataaaatgtaaggttagctcaaaggatattacagcatgaacactaccctttagtagtagtgctaaatatatggggggctggagagatggctcagtggtcaggagcactgcctgtttttccagaggacctaggttcaattctcagcacccacatgacagcttacaactgtgtataactctggttcaaggagatctggaaccctcacacagacctacatgtaagcaaaacaccaatgcacataaataaatacatgaagtatatactaatgtgaaaaggttacaatgtgactgtaataatttagtttactagaaacaaaagaaacatctcaggccagagcaatggcttaggggaaaggcaatggagagagatatctgatgaccccagtctgagtttgatccctagaacccacagtggagggaaacaagcgactcctgaaaggtgtcccctgactgccattaaacactctgtaacacacatccacactcacacaatacagtttttaaaaatcttattatgtgcatggtgttttgcctacctctatttctgtgcctggcacctgcagaggccagagaaggccattagatccttcagacctggaattacaatagactgctgagctgccgtgttcgtgctgggaattgagctgggatcctctggaagaacaggcagtgctcctgaccactgagccatctctccagccccacacaattacatttttttttttaaactaaaaagcaacaacaaaaacctcacgtatgttttctgtccatccttttaacaatatgataaaacaatgcatctttaaagtagtacatttctttgggttttttgtttgtttgtttgtttttgagacagggtttctctgtagcttcagaacctgtcctgaaacttgctcagtagaccatgctggtctcgaactcacagagatcacctgtctctgcctcctgagtgctaggattaaaggtgtgcgccaccaccacccagtaaagcattacatttctatatgaaatatacaggtttttgtttgggctttaggcttttaataatttgtttactctgttaagaacaatttcatattttctaaataaaattctaaccgaaagtaggacaatggagaataaagaataaaaactttctaattctgtttgtttttgttttgagacatactctcactatgcttcccagggtggctggaattcactgtggagccaaggctgtctgttaaactggagtgagccttttgctctatgtttcccaagtgctgagactgcagcatgggctacacacctcacttcctaaaggacttttctaaatgatttttgcttcaatatgtgaaataagacatagggaaattaatataatatggcgtggtgttgtagcacattcctgcatcccagattgacctcaaagtcacagcaatcctccttcctgccttagcctctaaaacagctggggttacaggcatgagccaccatactcagccgttcttcttaattcaaagaaatgtctttagtgttgtgcaaaaaccagaaaaaggtcctatcaattaaatgattagatatataaaggagaatgaatttaatttttgtaaagaattatgtttaaatgcagacatatgtttaaatatagatacaataaaactgattatatatatttcttgattttctatagttgcttaccaacattctctaattttttttccctaagaaatatattagttggaggtgtggtggtattctgtaactctaacactaggaagcttgaggcagcctcggctacataaggatcttgaggccaacctaggctatgagatcttctttcaaaagacaaaataactattgtggtgcattcttgaaatcctagtacttgagagccagaggcaagaagattagccaagtttgaggccagtctggtctaaacactgagctccaggtcagtcagggctatatatagtgagaccatgtctcaaaaaataaagcaacaaaaataaataaaaacaaaaccacaaaaatgtaagtcagatggaggctgaggcaggaggtcctttaggtccaggctgccaccaccacctcctcctttcgaagaaaaatctcattcagtttagagaacatgcaatgttcttatcaacatccatgtaagctcagcacaggtttcttgaatgtttagagtgatttacagcagtgacactgaactgagagcttaggcaagcactctacagctgagttccaccccagctctaattaagaaaggaggtagaagtagatggttctctgtgagttctaggccaacctggtctacatattgagtgccaagccatttcaaaacaaaaacaaaagaagatattctttaagcactaattttaggaattttttcttaattactggcaaataaagatcaattctctaaaagcaaataaatttaaaattaccagtgaaaagtcaatacttgagtcaatgcaacgagtcacatataacaggaggaagagaagaatatattcaaattgatatatatatatatatatatatatatatatatatatatatatatccatgattcttaccttttaaactgacaagggcttttgctgaagagcctgaaattaaaaataaaacatatcaggtggacatggtggtgtatgcatttaaaggcgtatctctgtgagttccaggccaccctggtctacataagtgagttccaggccacccaaggctacatagtgtgaccttatctcaaaaactcaacaagcagaaaaacaacaatgaaccccccccaaaaaaaaaaacccaaatcaatatatatttcataattgaagttaaaggaaaagaaaagaacttagtttaggtataaaagtgttccatttggtttgagcaatattgagcttgacatgacagatggatatgcaaagtaagtgcagagctgtgcatagtggctcatgtctgaagtcctagcacagaaaaggcagggagagcactgtcctgggttcaaggcaagcctgggctccatggtggctcctggacagacagcctagccctgtctgggaaaggaaaggaataagtagcctggcactcagagttagaactgcagagacctggcctgcctgtggaaattgtgacagccgttggaaatcattctgatagaaaactgagtaaggacagaagtggttttgcatcctcatccagaagtgctctagcactggaggaaaagagaaagaacactcatgttatcagaacaaaaatcagaagaggtaatagaacagagaaaacagagaataaacatgatccagagactctcatagccaaaaataagtccctgaaagtctagaatgcaggtatgtacatacttacagatctatacagggaaatggagttcagaacacccaagcaggactagcatgaatgtagagggagtcactagataaaattacaatagaataaccagggagtacctcctacacacagaatctattcttaatcaagctctttaggggatctgtggcaggtaacccactgcgagaagctcaggatctgttaacagtggaggcagaaggcaggatctctgagtggtagaaggaggagattcatcagggaaaagttttctgcagtttaatgttcaaaggccattaattatgggtaagggagtagggggagaaagccgtaaaattttcttaaaagggctggggatacagctgggttgagtactttcctattatgctcaatccatagtaacacaaaataaacaaataaaaattctactaggaagcttcaaataaaatacaaccaagaaacagtaaggtggacagaacagatagtcaccaagataccaaggagaatacagctcattccaggaaaacatgggcatacactgcgtgctgtctgcgcggaagctcctgcttgggccgcagagccgccacagcaaggaaataagtcaaagtccctgcctgctggagctcctgcttcagtcagggggacaaacaaacaagcataagccaggtgtgatgagctatggaaaaggtgaaacagatgacagagaggagtgcgggagggcaaactatttttatgaattagcttctctgaaagggtcatttgaacaggcttctgagaaaaaggcagaagtcacaagggtattcatttctattccacaaaggtgggaatcataggttgaggattctgacttactccttttaccttgttctgagaggcagtatagcaacaacaggaacaatggctgtgcagctaacagtctatgctgctcttgcagaggaacagagttcagttcccacatctgtgttgagcagttcttaatcttatctgtgaccccagctctaggggtatctgaaacctctggtctctgtaagcacctaccctcacagcatgtaccatcccaaacacacacttcaatcccagcactcgggaggcagaggcaggtggctgtctgtgagttcggggccagcctggtctacggattgagttccaggacagtcagggcttacacagagaaaccctgccaagaaaataaataatctcttaagaaaagagcttgagttctagaacactgcagctggctactgtgtagaccttggccctgccacttccttgctacattattttcagcaaagtatctcaactcactgtgctgttgcttcttcatgtgtaaaacagagagtaaacaagtaaatataaacaaaagtgcttaggacaatgtatacaacaagtggccaattttcagatgggctcacattacatcaactgtccaaatgatttaaaaacatctggttaagttagaatccagctctaaccagttccatttatccaacattcaaccagtatttactgaatgcttggcataagcagtttgagagctaaggccaccatcaaagcctccactctcagagtttgtattctagtggagagagacatacaacaaataactacataaaacagtaattatactttgtgacagttactataaagaatataaactggagttagggaaagcttccaaggaagtagcatctgaaaagcactagccataacatcaaaaggaacccccatccaccccaaaagcaggtcacaccatgaagggccaagcagaaggaaaaaaaaaggcctgagaaattagtttagattgagtatctgatgaagaaaatggccactgtgctgggggtggggtgaacaggatgatgaaagcaggggctgtgcttagaggtgggcgtgcaggtgtattcctagttattctcaatcactgtgacaggaatatctgaataaacaacttagagttgggaagacatagtttgctcaaggttccagaggttctttgttcacttcatcatgtacagaggatatggaaaagcagagagctgacgtgatggccaggaagaagaggaaaggaagacaggaagatgccagggtaacacataactaccacaggcagaccccgctgacctgctttctccacctgggccccacctcctacctttccccacctccaataatgctatcatatgaatcccccagagatgaatccgtttgtaaggtcagagcctcgtggtctaatggttttgaaggtacactcacggtacacaggtatgcctcactgatctaggcatttctcaatccaatcaagctatcatagctctgccctggtgggctgctgaccaaaaatcacactaataaatatgtgactacaagtgagacagcccccgagaagtcagacagtggtatggaaacacttcaagaagacacacttgtcacagaggaccaaaaaaaaaaaaaaaaaaaaaaaaacagctacaaaatcttaaactggatgctggagaaagatagtggctcagcagttgagagcactttctgctcttccagaggactggagtttggttcctagccccacaaacgcttgtaactccactccggggcatccaatgcctctggcttctacacacatgccacacatgtgcacatacccacatgcagacacacatatacataccattaaaaataactttaaaatctcagcatggtattctaaagaagaggagaacagcccagagaagagcgaatgcaaaggcccagagggagggcagtgtggctgcacagggaatgaaaacagcccaatcaacttagagatggaatgacaagaggtgcaaaatgaacacgggaccttagagctacccactaaatggttttcaacaagaggatggccgggaatgatggcacacacctgcaatactagcaaccaggaagcagaagtaggattgctgcaagttcaagatcagcacggtctacaatttgagtgaggccagccagagataatatatatggagaccctgcctcagaattaaaatacaaggtaacaggagcatgacatttctgctctgaaaggatccctctggccttcatatgcggggaaggaacaggttactgaaacggtgacaacctgggctaggtgatggtaagaataagaactgcaccatacagaaggtaaaagctccaggactgagtaaatgtttaaatatggaggtgagaaggaagcaccaaaggtaactgggaatacacaaggtaaccactcatcaagacaggagctgctgcaggtgaaatgagctagggcgggactctgagatcagctttcaatctctgaagtctcaggatcccgctgcaacatctacaggtgtgaaacaccaacagttcaagaatagaagcttccagcaaagattgttcccacatgtaagaatcacgtatttacatcaactgaagcaaagatcaatgagcagaaagcaaaaacaacaaaagagtaaatgagtgtgtgtgtatatatatgtatgcatggatatagatatagatatagatagatatcgaggggggagagagagagagagagagagagagagagagagagagagagagagaggtcacctggtcccagtaagtactcaagaaatgtcagcttttattattgatgttataggtgctattaactaatatactacaaaactcccttaactaaactgggcttaaaaaaacaaactgtgtctttcatatcaaactgaaattactttcatcttctaagaacatgctctaattaataatattatttcacattcagtttctttttttcttttctttggtttttcgagacagggtttctctgtggctttggaggctgtcctggatctagctcttgtagaccagtatggtctcgaactcacagagatccgcctgcctctgcctcccgagtgctgggattaaaggcctgcgccaccaaccccccccctttagccaagtcttttatgtctatttgtgttactgtgtagcaaatcaaatatgcaattcctgcttttgacaaagctgtagtttagttaaacatgctctccggcgctcgcgcactcacacacacacacacacacacacacacacacacacacacacacacacacacacacacgcaagcacgcacgcacgcacgcaaccaaagtaccagtaccagagacattatgtgtaatataaaccattaggttatatatagcgaattaaacagtgtagctgatatctgaacctcaatataaatctcaagtttgtacaaagaacaacagtaagaagacttttcctgaaggtgtgctttactatttactagtctcctggcatttctcagtctaatcaagctgtcagagctaaccataacagcaggcatgggacaaaaacttaagtggctctgctctgggggagagggggctgctgaccaaatcacacccacaaacatgggactgcaagtgagacagccccggagaagtcacatggtggtatggaaacactcatcacggaggatggaaacatttcagcccaggctggcttcaacttggagctacccttttgtctcagcacacatttgagattaacacacatgtcactgggcccagcttagaaaaatttgttccgacgggaggtgacattctgcttattaagcttatctttatttgcaagcatcctaagtaaccatcagccaaattctccaaacaataacaataaaactcatagattgtgtatacagtacagtaatcaccaggtatataagtcaagactaagtaaaaataaaaaacccagcacctcagccattctagccacattcggagtgctccacagccatatgtgaccaatggctaccctacgggacaccagaaaagtgaacattccatcactgagaaagttcttttgacactcagcactgatctaaaccaaagctaacacacatgcactttgaatacaagtcatcagcttggcaacctcaacttttgacaacaatatacaaaggaatgacctcaaacaaaacaaaaaaacaggattaggagtaccttgaatctctcccttacaggtgtgtctgccttgtgcacagacacagcgaacagagatggggcttctgagacagggtcaggcccagtttattccacgagttaaaacaggctggtcagaatgtgttcagtaagttcaggaggggtctgatgaactcataaggcaaggttactttgtttaaataaactttggaataaactgggcctgtcctgacttcctgttaggcaactccaaatggttaaaaacaaaatactcctatgtcatagaaataatacagtcgttctaaacacagactgctggggtttgtttgtttttccgagaagggtttctctgtgtatccctggctgccctggaacttgctctgtaaaccaggctggcctcgaacttggagatccacctgcttctgcctccagagtgctgggattaaaggtgtacgcaccacaccggcccgagaatcttttgttgtatactctgaccaagtgctacaaatacacgccacatagtgcgtgctgattcaagaccattttgcaattaaaaatgtcttttttttaatagtttgtgcaatatgagaattacaaaattgttgccttgaccctgggttgcagaatcggtgcttttcctgactgcgtacaggtgaacatcctgtcttattaagaggttgagtgagtaaagaaggttaagtagggcaatgcacaggagtgggtgtcgggctgagtgacatccacgtacgccggccgcggtgctcacacccttgtgtaaagacaccccatcttctgaaggcacatccactaagaagcaagtgtgggaagggagctacctcaacactgtagccaagctggatcatctccggaaaggtccacggccacctgtagtcccaagggaaggggccagcccagtgtgacacggaaggaaacacttccaggatggacacgggggagggggcgggggggggcgagcacaagtgccagcagaagcaggagctgtcacacacaggatcggagcagaggcccgggcacgaggaggggctgagtcccaggtgcccagcccgagccctcccggcccccggcccgccggcgagttacataaccgggcgggcagtgaggacggcgcccgcaaccgggggccgctcttcgcccacctcagccggggaccgcagtcgctccgggagagcagccgccgactccgtcaggacaggctggactcccgggctttcggtttccggcgctggcgctcacacaagcccagaaacagacacacagacaccataacaaaggcggcgacgcggcggcagcgcctgagtaggaaggccggggagcgcggtgggctggcggccgtcccacccgcccggcgaccggacgcggccggtgcgagcccgggacgggcagccggcgggaaggagggctgctccgagacgctacttactctcgtcaggcaactggtcgagctccgccatcttgaacgagccgcgccgctttttcaaaggctgcccgccccggtgcattgtggggcggagactgtctgcgagggaggttcgaatgaggagctcgcggcccgcggcgcctgctcccgccaggccgcccggctccgcccgagcctgcccggagggggcctccggggccgcaccgccaggacccggcctgacggagggcaggggaggccgcgccggcaggcccggcagggccgagcgcgggcggggcgccagccccgatccgctcgcccgctcgccgcccgctcgcccgcgccacccctcgcccgcgctcgctccggcgcgcggcccgcgctgcggctgcgggaactgcaggctgtttgtttcctgaggggagcgggagggaggcccgggcgggtggcgcggcggaccggacccgggctcccgggtgcaaagcgggcaccgaggggctctgcccgaagtaacgagtgcccggctcccccgagccgcgcttcccaggcgcctccgtccctcccttcaccccggtctccaagtgcccaggccgcccggcgtccgcccgcttcgcccgcgggtcacggacgcggggtcctggccggaacctgagctgcgagcgagcggccggggcgagcagcgagaccttgagaggtcaccaagttggtgtaggccgccgacggctggcgaagtgtctgtcctgcgttctttctgtactgcgttccacccgagaccggtagggagctgggagcctcacagtgactaaggatgcttggtgaagatacaagtgacaccagccaagtgtaatgaaactggatgagaattcctccctcccgtaccgaaagaagccccggggaagatttcacagttcccgtctgcaacactttacagtattattaaaccacggttgcttttccacaattcctttaacaagcgtggccgacttcccgggtcttttctccaagactttatgaggaggggctggtcggagaatctagcagtgaagcatccaagaactcaaaagttaaaagatggtgcagtgaggtgagaacagatctagacaggcctgcccaggccaagttggacttggtgggagcaatagagtgggcttttaagtagtaggaatggaaggttttcatttatgttctagaagcaaaaaaagtgagacgcaggctggagaaagagaagacgagaaccctggagaagcaatagaggatgtcttctaggtcaggcaaagggcagcaggtgaccgactgctctactggctgtggaagttgagggtggaactcgggctgctgtttgtatcattccaggcaagcttaattcttgcggttcaaattctcagctgtaaaatgcagggcaaaaacatttgtcttaataagtggaaagaccttataacggctcctttacccgcggttaggttagctgctactgctaccacctaagattgtatcaaccacagaatgtggggtggagggaggggcaggagggaatccacctctcaagaggcgaggaaaaagaagacttgggaagaggaagagggtgaggaggtgggcagaaagcaaaggccagtttaaacaaagtaaccttgccttatgagttcatcggacccctcctgaacttactgaacacattctgaccagcctgtctaactcgtggaataaactgggccttcttggggcttgggtgtgttcatcgatttgaaaatgaggttaagcttaatccatttaattgatgctatgacaaagtatcttgtgacttagtaatttctaaacaacagatttatttctcacggttctggattctggaaacggcaaggtggttgtgctaatattggtgtgcccatcttcctgttacatctcttggggtgaaggatgtgctgtcccaagacagaagaacaagagtgctccttcaatactgaactctgtaagggtgccaacctcattctcgggccagagcttaatagcattgcatgagggactaaatttcaatatgagttttgaaggggacaccaccattctactaatagaacatgaaccataggataaattgcctttaattgtgcattccaacttaaatgacatgattttgtaaattatcttgttttctttaacatacacatacatatgcacatatatgctcacatgctggagcttgttggacttgatggtgtactgctttaatcccaacactccatgttgtgtagcagtttcctgaggttaaaaccttccattttagcggaaaatgtcttaagatgtcttcagagaagtaaaacaacaggatattctatagggagatgaaatactgcaagaaaacaccttaaggaagttaacaactcaaaatagtttcagagctgagtggtggtggcccactagggaggcagaggcaggcggatctctgtgagctcaaggacagcctggtctatagagctagttccaggacagccaaggctacacagagaaacggtcttagacacaacaacaacaacaaaaagtttcaggaagtccctgaaactgactagatgcactagacattctctcccctaagagtgtaaagagtagagtaaagacttctgagagtcacctggaagaagcagagataagtccagcaggaacagactagccaaagcagcctggaagaagagacctgctgaaccaaatagaagagacaaagacggctgagctacttggaagaggctcaaaccaactgagccacttggaaagggctctacaacctgttgagttgcctgcagatgatggtgtgctgtagatggatttttctttgggctgccagctcacacaaaataacatggagacttattactaattaggaaagcttggccttagtttaggcttattccattagctctcttttgtttttgttgttttgttttttcagacaggtttctctgtgaaacagtccttgctgtcctagaactcagtctgtagactaggctggccttgaactcacagagatccacctgcctctgcctcccattagcttttataagttaaattaacccatatcttttaatctacattcttccacttggctcagttacctttactctgtaccggccttcttactggcgattctgcctcttccttttcccagagtgctctctccagaagtcccacctgtacctcctgcctagctctttattaaaccaaccacagggacacatcttcacacagtgtaaaggaatgtgccacaacagtgtgctctaggtttccaactttccaagttgtcacacatgcaggggtctttggtgacagctgactttgagtcatttaagctcctctaagtaaccccattgaaacattggttcatcaagttggctcctctctgagcaggaagcagttactcccccatccccaaggtagtgacacacatttttaatcccagcactcagaaggcagaggcagatggatctctgtgagttcaaggccagcctggtctactgaatgaattccaagacagtcaaggctacacatagaaaccttgtctcaaaaaaaaaaaaatcaaacaaaaaaaaatctttcccagagcaggtattagttgtgagtctccataggagtcctgggaattgaacccagatcctctggaagcccaattggtgttcttaacctttaagccatttcttttaagacacttgtgttaatagtggctacctttagatagtagaatcatgaatgatttttattttctttatatctgtacatatagcctttctacagaaaaaatagttttaaaatacaagcaagttgcaggacattggtggcgcacgcctttaatcccagcactcgggaggcagaggcaggcagatctctatgagttcgaggccagcctggtctccagagcaagtgccaggataggctccaaagctacacagagaaaccctgtctcgaaaaaccagaaaaaggctgccagggatggcagcaaacacctgtaactctagcacttgaaaggtgaagggagtcaaaagtatcaggaactcaaggccaatcttcacagcaagttcaaagttagctgggtacttgagaccctctggaatgaaaacaaaagggactggagaaatggttctgaggttaagagtacatagcacccttgcagaaaacccaagttcatttcctagctcccttatcaactcacgaccgcttgcacctctgttatggagactttgacactctcttctgacctcaagggcaacttactcatgcacatacttcccctcacatatatacttaattaaaaaaaataaggccaataatgctgggcatgatagtattcaccttcccaatactgggggtgggagtgggggcagaggcagtcaaatctctgagttttaggatagcctggtttacataggaagctccaggcaagccagggctacataataagaccctgtctcaaaaaaaagaaaagcaaacaaaaagcatatttatgaaatggaatagtgttcagccataaaaggaatatgctgataaacattaaaaatacactaaatgaaagatgcctgtctcaaaagaatgaattgtgtgattttatcagtgggaaatgtctaaaagaggcaaatctataaaaagagaaaagtagattaaaagagaccagcagctgctaaggctgagtgggaaatgagtagccagtaaaagggttaggatttcttttggggtgatgaaatgttctaaaattgtagtaatggctgcagaactgcacatctactaagaactatttagtaaactatttaaataagtgaattgtatgcctatgaattgtacagtaataaaactgttactggaaaagttattttttttcccacactgttaatcagctttctgtcatttgacatcccaaggatctagacccacaggttgggaagcactgctatattgcaactttgaggaccaagcctttaacaaaatgggcctttctttgggagatattcaatatcccatggcacagaccttaggatacgtctcaatttcaaatctctggtagtcagttgtaccaaatttcttctcttaaaccaaagagatgctcttcagggccctgtaggatgactggtattaaactgctcccctttctaccctgtttcttgggtcaaacttaatagtctgaaaactctgctagaaggagaagctgcttttcttgttagacccaagtggcaggagaaggcaaactggatttgtaacattatttttttaatgattatgattccagaaatgctggtgaggtgactcatctggtaaacgggcttgccttcaaatgtggcagccggaattcaatcccaaggacccaaatggtggagagaaccaattcccactagttgtcctcttatcttcatggagtgctgtggtacataattaatgtaattttaaaaaatgactctagagcagggcagtggtggcgcacgcctttaattccagcactccggaggcagaggcaggtgcatctctgtgagtttgagaccagcctggtctacagagtgagtgccaggacagcctccaaagctacacagagaaaccctgtcttgaaaatcaaaaaaaaaaaaaaaaaaaacctgtttctgaagagagaaagggagggagggaggcagggaggaagagagagaggaaaagtgctcctctctagtgccacagtgagaattaaaggagatctaaaaccctctgctcacacccagctcattaacaccagctgcctcccactccttcctacgtcctgctttcttaacttgtgcccagaaaggactaagtgcccttttctaagacactgcttctatgcctttagtcccagcacttgggaggcagaggcagatagatctctgagttcaaggctagcctggtctacaaattgaattctaagacagccagagctacacagagaaaccctgtctccaaaacaaaacaaaacaaaaaaaaacaaaaacaaaaaaacccactgcttctaaaaacattactcttagcaaaatttactggtgtgtcttggttaactatggatgtttttcttgcttttctctcctcgagacagagccaagacaggaaatagccacaacctctttccccaggtcatcccatgtaatagactatgaaaagtcagatagacattctgtatgaaagaatggagaggaacagcttcaccacacacaaacacactgagtccatttctaagctcatagaggaatatcagtgaagacagcataccaagatagacactcaaggcagagtcattaccaaaacgagactggacagctcagaacagtggacttggacctgccaaggtatccccttcaggatatgtatgtgttgtggggtgtaaggcttttgtatttgaacgcatggcccctgactgactgtcattttaggagacttcagagccttcaggaggtaaggccaaactggaggaagtagattctcagtgaattggtctttgtttgttaagggttaccacgtgcgcccaaagatgaactgtagtccgtgatggtaagacttctttattcaggtaaacaccagagcaaaacgcaagccagagcgagctcacaggaagcaagctagggcggccagagagaaggggccagggtctctacatgcagcccttaagaaccttcccttacgtcaccccccacacacttcccttcaccctgccctcaagggcgaatcccgggtccacttggcacctgtccgggttgcctggggcagggccagggtgtctccctacatttgttcatacattcctaccccactgtggcctagtctgctctacagactcccaagatagccagtctgacataagcagcttctggcaggaaggcgctgagggtccagtccatcgtggctaccattgcggatacttcaaatggtgctctgtggccatcactctgtgggtcatttggggtcagggtgaatctgcctcttggaattgtttaatacttgtttctttacagaagcctagagatagtcaacaactaaggctttttcccagaagatggagtgtgcctgagggatacagacagttgttgaatggatgcccatgatgattcaagacccacaactactgtgcaccctgtggaacctcagaggcctggacagggcttctgtgggaagcacttcatagccagtgccctttgccctgcttcctgttgcctctgcaggtgtagggcctgcttccttgtctgacttctgtaggggaaatgttagccatgccctcttggggactggcacaggtgacgaagaccacacacactagtggtcagtgacgtagcaagaccttaaatatgagggtcacatgcaggcggctctctctgttccatggtttgcctggtttagaggactgactcgttgcgtgagtactttcctattaaaaaatctgtcaaacttgctctgacttctttgcggtatgcattaattgtgccccacttatttgatgtcacaagaaggatgtctctgtcaattctagagtttatatattatccttctgtggtctttgatggagttgaaaacagttatggttatagttttcttcagctattctaaaagataagttacccatctttttatttagacagaaaagaggagatgatgggggaagtgcttcttttttttgtttgtttgttttttgttttttgttgttgttttttcgagacagggtttctctgtattgctttggaggctgtcctggaactagctctgtagaccaggctggtctcgaactcacagagatccacctgcctctgcctcctgagtgctgggattaaaggtgtgtgccaccacagcccagcaggggaagtgcttctatgtatgcatttgtcttattggatgataaataaagtactgtttggccaatgaggcagcaagttaggtgggactaggaatcaaggaggattctgggaaatgtagtaaagaagtggtgagctaggcaggaagtgacatagcagggagactcatatataagcaagggcaagaaggaagtcatccccttttcccttttctcttcttcctggtctctgctctggagtcaccatgtgatccgctggcaagagagggtgccaggaaggcatcctccataagataagtctttatggttgataaattaagactgagctagcaagtaagaaatcctagggattggccagcagtattgtacctaatataagtctctctgtgttacttgggaccttaatgtggtggcgggcagaactcggtggcctggcggaaagcacccacatggtggtggggctctggtggatggagtaaagacttattgttacagaatggtgtcaggagtgggataaccccacaccctgaggttcccagaggaagcagggaacctgccgcaacagctgcattggagcagcttccatatgctagccatctcgagctcttgggggttggacttggcactcccaagacggcctgcagccctcgagagttctagggttaggattctgccctctcaccgcctcgaactgccttcccaagactagtctgtggcagaacccaggcagctagcagtagtgttacgaacttccatgtaaactacacaaaagcttaaaaagggattttggaagcaaaagaacagagacaagacttcttttccccatcagacttccctctgctctgtctttctcaagtgttgcctccacttatctacatgtctgtttccttcacagtctgcatctcagagagagggaccccaataggactgataattccttatgtggccagaaaggatgtgggtacagagactgcctgatactccatagtggtgtcttgggagaggaaggctttgcaagatagagaaacggtgcttaaaaggacaatggagggcgctggagagtttattcagtggttaagagcacttgttgctcttgcagaggatctgggttttaattccagcacccactgggaggctcgtgatttaactctagtcccaggggatttaacaccttctgatctccataggcactccataggcacttggcgcacagacagacatgcaaggcagaacacttacacacataaaataataaaattaataaattaataaaaatagcaggatctagtgagacatgcctttaatcccagcactgggggtgggggaggggcagacagacccctgaattcaacgccagcctggtctataggctgagttccagggctgcacagagaaagaagaaagaaggaaggaaggaaggaaggaaggaaggaaggaaggaaggacagaggagtggtgggcaggtcatcgacatcctgtgtggaaacaaggaatgcagagacctaaaagctgagtgcagagccgagatcactccattagctcataaagaggcccctatcaactccatgaagagtggtccccactgagcagcaaacacaggactgagatctagaaaatgagtaggtgcctagtcaaggcaagtctgctatatcgaatcctgcttagaaatcctaagagcttgactcatgggaaggaagtgtctggggtaggaaatccctcagagattcagctctgcagaactcgaggttggagtaatgtccaatatttcctcatgcaagaagacctgcagaggtggctctctgacaagcaacagggggccccttcaagagccccccttcttcttcttctcttggctactagactgatggccaggattacatcccagcacaacctgcctagaagatgtgttgggcctgataaataagaagtaccttatagcccagttgtgtgatgcatacatgtagcctcagttgaattggaggctacacaaagagttccaggatcacccaagctgcaaagtgagacatcatctcaaaacaaaacaaaaataattggacttggtgttaagtgaagtagctgggcacagataagtgacacatgttctcatttatgtgtaagagcaaaaagttggcctcatagaggagagctgttatcaaagccaaggaagggtgcaaggaagcagggggaaggggactggccaatgggttcaggcctatggatccataggaggcatctgtggttgataacagttggctagcagaagggatctcaaacattcctgtggtggtttaaatgagaatgtctcccagagggttatatgtttacatacttggtccccgtcagtagaactgcttgggaaggattaggaagtatggattaggaagtgagtggagggggggctttgtggctttaaaagcccccccccagcatccccagggcactctcttgtcctcctgcttgcaaagcaagatgtgagttctcagctgctgttcctgagccaggcctacccgttgccatgctccctaccatgacggtgatgggcctatatccctcaggactgtaaacccctgataagcctttccttccataagctgcattgtgtcatggtgttctatcacagcaacaggaaagttaacagacaattcctaacataaagaaatgataatatctgaggtaacaggccaatgatcccgagccagtcattgcacagtgtgcccatgctttgcaatgttacagtgtacacgttaacatgcacaattactataattgattgaagataaacagagataataaaggaattgcctagcagggctaaggctcagctgataaaaatgcctcccatgcaaacatgaaaacctgaattcaatccccagcacctacaatagtcctagcacaatggagacagagctcactggccagcccacctaccccaggtggtgaactccaggccagtgagagatcctgtctcaaaaaacaaggtagaaagtacctgaggacctaaggaacaatgctctaggttggcctctgccctacatttctgtgcagatgtacacacacacacacacacacacacacacacacacacacacacacagacacaccacccacaccacacacccctagcaaatattgacaggaccagtacagtgcactcgggattacatcttcagggctgttgatcaagaagacacgaatataaactgcataaattccctggcctgcattctttccttggggtataggattccatgccccagcaaggatctcaagggaatccacaaagcttagaggaagccacagtcaatgaataaagttgaaaaaaaaatcttaagacaaggtttcactttgttgcccgtgtcagccttgaatttgagacagtccttctgcttcagactcccaagtgctgaaagcacaagtgtgagccacagtactgggctatgcaggtgatagatgaaagaataaaaaggccgggtgttagcggtgcacgcctttaatcccagcacttgggaggcagaggcaggtggatctctgtgagtttgagaccagcctggtctataagagctagttccaggacagcctctaaagccacagagaaaccctgtctcagaaaaaagaaaagaaaagataaaaaagactctgggaggtggaaaggctttatggacatagtctatgatgcagaagacttcctcggggacagggcactaactagctacctggggaggatgctatttggactcgataaaagttctgctctgagtttcacttgtatgtcatggcacgagtataacaatcataatcatcatagtaaaacaataacaataatgaatggtgatgatgataataaaaatacattttatgtgtcttgagtttttgactgcatgtgtgtctgtgcagctggtgcatgcagtgtccacagaggccagaagagggcatcagatgcgctggaactggagtcatagacagttgtgagcagtcaagtgtgctgggaacggaacccaggtcctccggaaaagctgatctgtactgctgagaaagtcatttccagacagggtttctgtgtgtagccctggctgtcctggaattcactctgtagactaggctggtcttaagattaccgcgtgcgctcagagatgaactataatccgtgatggttagacttctttattcaggtaaacaccagagcaaaatgcaagccagagtgagctcacaggaaccaagctagctcggccagagaaggccctgggtctccacgtgcagcccttaagaaccttccctcacccccccccaccgacttcccttcaccccgccctcatggccgagtcccgggtccacctggcacctgtccgggttgccattgggcggggttagggtgtctccctacaggctggcctcaaactcacagagatccacctgcctctgctcctgaggcgtgcaccaccatggccagcctatgtatctatctatctatctatctatctatctatctatctatctatctatcaatcatatatatatatatatatatatatatatatatatataaaaagagacatactatggatgggctggagacacggctcagaggttaagagcaccatctgctcttccagaggtcctgagttcaattcccagcaaacacatggtggctcacaaccatccgttatgagatctggtgtccttttctggcatgaggcatacatgcaggcagaacactaaacaaaataaataaatctttaaaaacaaataaataaatgagatatacaattcagtaagaccagcagaagatgatttcttcgagaagacattgttaaggaacaatgcaggggtgctactctgagggtaaagagtggtggtacgaaaggctggactctttcagacgggggacatggcaggggccccttaatgttctagagttcagtggcggtgtttaatatgacaagacaggggtatccttttgttgctgtgtttcgagacaggctctcactatgcagctctgactgtcctggaactcactctggagaccaggctggccttaaactcatagagatctgcctgtctctgccttgtgagtgctggaattaaagccgcgcgccactaagcccagctgtaggttttttgttattttattttttaataaaaatcaacaggcttttagggaaagcctgtggaaactgatccatagaaatatttgaagacagaaatggttaatagactaggatgtctctggggagcaaaacagggcagccacaaggctgctgtcacatctgtcatcaaggggaggcataagtggaggcgcagtaggctgagggcagtcaccccaataagaagtcatgatcccttgtccagttctgggacacaagccagctttcagatctggaactcactgaagagctagccaggacccaagaaggaaagattgtgacgttgtgagagtgtgcactggaatgatcccttgttattccccagagggactcacttagagcaaggggaagtaaatgtaagatgcttcaagaactgtttcaaggacttggacacggggtctgagttgacactacagtcataaccctggagccaccaggagctcccattagcgttggggtgagtggaggaggaagacaatgaatcgaatcttgaccagagtctgttcactgtggcactgttgacacacttgatagtcacttcctggttccctaaggtggaattcagcagttggagtaatttccttcaagggccagcaggttagagctactataagaaggttaaagggcaaatggaagtcactgaaacttttcccttgtccccagagacatacataaaaagccagagctgagcatgggaatgcacacgcgtaatcccactcaggaggctgaggcgggagacctatgagtaggaagtcagccttgaccttgataccaagaccttgaacaacaaagaaagtaagaaataaaaaacaaaagtaaaatcgtattctgaagggaagatgagaactgccattaaagatctacaagatggggctaaagagatggctcagaggttgagagcactggctgctcttccagaggtcccgagttcaattcccagcaaccatagggtgggctcacaatcatctgtaatgagatctggtgccctcttctggcctgcaggcatgcatgcaggcagaacactgcataatgacaatctaaaaaataaatctacaagacgttctcctctcagatttgattgtttgtttgtgtttttcaagacagggtttctctgtgtagccctggctgtactagaactcactctgtagaccaggctggcctcgaactcacagagatccacctacctctgcctcccgagtgcggcaattaaaggcgtacactaccactgcctagcaaacacaagtttctgaccacttgtaaaatcatgcagttacacttacatatttgtgtcggttagtttttgttttaaacatttttaataatttatttatttgtatttcatgtacattggtgttcttcctgcatgtgtgtctgtgtgagggttatcagatcccctgtaatgggagttatagacagttgtgagctgccatgtggtgctgggacttgaacctggatcccctgaaagagcagccagcactcccaaccactaagccatctctccacccccgtgttggttagttttaatcatcaagttagaatcaacctagaatctccttgtagtggtctctataaaagtattgtctagatcgcattggcctgtgggcatgtcaggatatcttatcacagcaacagagataaaattagaacattattctgtggcacagatctctgagtcagaggccaacctaggctacagagcgagttccaggacagccagggctacacagagaaatgttgacttgaaataaaaaaaaaaaaaaagtgtggggttctgcaatgtctagatgggaacaacagagcctcacagttgagatgaatcagggaaagctcacactgcagccaggcccagaacatggcttgggagggccagaccagattttagtccttggctggacattattttgcaatgtacaaactcattaactggacacaaaagctggaagaattcaaaaatagacaggattgtgccttttactacgtcatactctgaacaaaggacaaaagaatgacaaagacatcacaactatttttgtatatttaaaacctgttgtaaaggtagtaaccacagacaagttatgtcactagattactgtgctggttttttttttttttttttgtcaccttgacccaacctagacatatctgggaagagggaatattaattgagaatatgtctctatcagactggcctacagacaagtctgcagggcgttttcttggttaacgatagatgtcagggtcctgcctactgtgggcagcgctgcccatgggcaggtagtcctgaatggtgtacataaaaccggctggggaagccgtgggggcaagccagcaagcacagctcatccatgtctcaacttcagttcctgctccatttcctccagtggactgtgacccgggatatggaaggcaaatgaaccctttcctccccaagttgcttttggtcatgggagttttatcatgaaatagaaacctaactatgaaaactacattttttatcacttttctgaaaacaaaaaccaaatagttttgtcttggtagttattttctagccaaatgagcaaattatatatacacatactcacattggcattcagtacagtgatgacctgtaagattgcttctaaacatatattttaagaaattatacattttttttttttgtttttcaagacagggtttctctgtgtagctttggaggctgtcctgaactagctcttgtagaccaggctggtctcgaactcacagagatctgcctgcctctgcctcctgagtgctgggattaaaggcgtgcgccaccaacacctggcttcagtcagtattcttaatcactgagccatctctccagcctcagaggccgccaatttttttttttttaaagaaattatgtgtttgaaaccaggcatggtttaatctcagcactagggagacagaagcaggcagatctctgagttcgaatccaccctggcctcaaacagggtgagttaaggtaggacagtcagggctacatagagaaattctgtttcagaaaaaaaattttttttttatgtgtttgattttcttgcctgcatgtggaaggggactttggatccccttaaagggcccagcacctcccaataacatcattctggaccctcctctgctcaggttgagtcctctgtactcaacctgagtgctcaggttgagacttgtaagcatggcctcctttgtgctgcccctggaagaccaaggagtagggtccagctgcccccccctttatttcattctccaatgaaaagaaaataagtaggttttcctgctaattgtcagagagcaggcagcaaagtcaaggaaatgggcaagttcttatatccaggaacccgtagcagcctcttcaccccttaaatgattgctccacccttttctttaatcagctgcagggctcaccattccctcctgggagtctacctctggccaactggacttcgcctataaaacacaacttcccagtcttctgcaagtgattcaggcagacaagtgagcatccctttgtctggacaaaagtaattacaccagagcaggaacaaggcatgcacaatgtctttagggactgaggccaacaggactctctcaggcaaagagttctctgtctttgggtaggggctctgaacctcctgagggtgcctggggcccaccaggctcgcccacctcaacacagacctggccgaggaatcttttcccaccacatccctattcctgtgactaaccagggaagactaaggaagcaatgaaggagcccaagagcaatgccactgtagtgacagcacagggagtgagcgctacaggaaacttctcagctgcactacagagatttattgtttcatcacccacttattgggacacattttggaaaaaatatgaaaacccaaagaatgggaattactcagaagatggaaggagggaggggagctcccaggtggtgggtcccatccaaacatctaaagaataatgtttttggccaggtctggtggcacagcctttaatcccagcattcgggaggcagagacaggtgtatctctgtgagttcaaggccagcctggtctaaatacggagttccaggacagccagagctatagtatggccctgtcttaaaaacagacagaaaagaataataatttttcaaataacctagagatgagattgcagctttacattttggggctttctttctgtgcatttatatttaattgttttcctcacagatttttattgtgctatataatacagactttatttttcattatgtagcctaggttggtttggaataatctttctacttcagcttctgcaatgcttggattatggatgaggtggtttttttttttttttttttgtactggaactaaaaattagttgacacatggtaggcaagcaccttaccctgagtcacatccccagtaccaataattaaaaaaaaacacatatttgttttatttctaactatgtatatatgcggtatggggtggagggtatgtgtacctgtgagttcagatgctgtggagtctagaagatggtgtcctatcccctggagctggagttctaggcagtttggagccacccagtgtgggtgccagaaaccaaactcaggtcctctgggaaagcagtacatgctcttaactgatcaatctttccagcccaagaattaaaaaaaaaagctctttccttctttctttctttccttctttctttctttcttccttcctttcttccttccttccctccttcctatctacctaccagtctatcatccattcattgtacatgtgtgtgtgagagagatgcatttagaggttcaagaacaactctctggagtccatttcctctttctgccatatgggcctggggagtaaactcatcttgccaggcttgtgggcaaataccattcctgagccatcatgctgcccccctggaacttgaaacaatcctcttgcctcagcctgcgatatgctaagattatatatgtatattatcctacctagctccagatctttttttcaggacagggtttctgtttaacagccctggctgtcctagaactcactttgtagaccaggctggcctagaattcacagagatcctcccgcctctgcctcccaagtgctgggattaaaggccagattttttatgatttatttttattagttttaagtatatgtagatatgtgtgtatgagtgcaggtaccttagggaaccagaggagtgagatcccccaggagctggagctggagttacaggctgaggtacctgacgtggatgctgggaactgaactcacatacatcctttgaagaacagtacatgctcttaaccactaagccacttcctcagccacaaacttttttttttagagtaaactctatggaacagactctaaaccttcaattttaatcagttcagtttatacaatagtgtgacaggtgcaatgtttgaaagtgtagggcaacctgagctataaggttacttcaaggccaacctgtgcaactcagtgagaatctgtcttgaaatgaattgggagttggggctggagaatggctgcttagcggctgttcttccacaggactgggatgtcctcagtacctacgtggtggctcacaactgtcagttacctccaatccaaggcatctgatgtcccctttactttctgttgctttgacaaaacattgaccaaagccagccgggggaagaaagggttcatttcagcttgagggaagccgaggcaggaactcaaggcaggaggctggaggcaggaactgaagcagaaccatatactgacgctgtctattgccttgctctccagggcttagcctgcttcattatacagcacagaactacctgttctgggtggcaccgtccacagagagccaggcccccctacatcaatcattaatcagggaaatgctccacagacccctccacaggccaatctaatggcagcttttttttttttttggtcaactgaggttccctcttcccagatgcctcaagccttcggccttggcaaagaaacagagtgcttggggaatgtagcacagactggctcacttcatggcaaccaggaaggaaagcacacatgccttagttactttgcagctgctatgaagagacaccatgaccaaggcagcttatagaagacagagtttactgggggcttccttgcagcttcagagggttagtcagtgatcgtgtggggagtgtggcaggcacggtactgaagtagtagctaagagctcacatctgattcacaagcatgaggccaggaaagagcaagataactggaaatgatgggatttttaaacctcaaagcccgctgtaccaggctctttcttttgggccaccaaccagcttccaaatcatgacacagagacttattattagttttgaatgcttggcttaccttgggcatgtttatggctggctcttttaacttaaagtaacctgtttctctttatcttttctttctttctgtctctatgtctgtctggctgaaggcttcctggcttctggccccaggcatctccttcattctctccttcttccttctgtttttctcccaaacttagatttttcctcctatttattctctctccctgccagcccctcctatcctttctctgtccagctattggctgttctgttctttatgcaccaataggcaggcaagatgaacccaatacaacacatcttttcataattaaacaaatgcagcataaacaaaagtaacacacatttaaagcgatattctgcagtataaacaagtgtaatacatctttgcccagttaaaataatatttcacaacagcccaccaccaccaccaatgacacacctccttccaaaaggccacacctcctaatcctttccaaacagttccactaactggggaccaagcattcaaacatatgagcctatggggattattctcattcaaaccaacacacacacacacacacacacacacacacacatacacacacacacacacacacacacacacacagaggggggagtgagtgagtgagtacttgagagccacagggatgccaatgactcatgatcctcttccaagggtgcctgcagtcacatacttcctttcagtatgtcccaattcctcaaggctccacccccaatcccatagcaccagtggcaggggattatacctcatacctttggcatatggacctttggggaccactctgtacccaaattatggcaaggagtaaggtgagtcactgcaatcttcttagcttgtgccagccccacttgcctggattcacagtgcaatcaggtgcccgctgcagactcttctgtgggtacctcactgcttttctctaggcagactccctatctgcaggggctggcttgggtctgatctcagacggtcatcattagtttcatctgtcactgtccctttcctggagaggccctggagtcagtgagtaggtgtagaaggtgagcttgtcaagtgacctctcctatacacagggcccccagagggccagcagcatgtccatcttcctgcccagcagaaatgggccagggtttcagacagagagcatgaacatgggtccccaggctgcaagtgctgtgaagggctcttgatcgactatcagacagaccacatcatgactgagggctttagaatcaacttatagacacattgggaattcaaaggctgggaacagaaaaggccagattctgtgggaagcagaaaggctgtaggggctctactttcctgctctttcagttgttttcttgctttctggcccaagatgtaagcagtgtgccacacactgtgactgagatggccctcaccagaggcttagaataacaggtcatacaattttgggccaggactcccaaaactgtgaggcaaaatattttggttttacgccacaagagtttgtcagtgatggaaaactgaataatgaggacgggaagagggctgagaaagacggaactgtctcttccaaccgagggagagggaggggcatggggagccagtgacactggcatttagtctgggaagggagaaatggcaaagccaaattaaagttagagtgccaaaggtgtagctgttggtggagtggtggtctaacatgcacgaggccctgggtttgattcctagcacggcataaatgggcctgtaatcccagcacttgggaggtagagataggaggattgggagcctctggtagctgcgtgagtttgaggtcatcctgggatacattagaccagccgttctcaacctgtgggtctcgcccccacaggggtcgcatatcagatagtctgtgtatcagatatttacattacaattcataacaatagcaaagttacagttatgcagtagcaatgaaataatatgaggatctgtattaaacagtagcagcattagaaaggttgagaaccactgcattagacctttctccaaccaaccaaccaactaaccaaccaaccaaccaaccaaatcctgctcaccccatcccaacagctgttaaatagatatgttctctatattgttgaagaggtgacactgggcttgagttgagtcttagaaggtcaccatggggaattaaggggaagaattaaaggcctgcagtttccttctggtagcgaattctaaagtctagtgtaagacaaagaaatggttttgatcactaggtgtgtgcttgttcaatacactgcagacagaacatgttgtcaggtctctgtctctttggttgggatatttcatgtatttcctcaatattgccacaaaccagaccgacctggagatgaccttctgcactggaacagaagcccaaggacttctgttcagtaacagggcttagagttgaagctccaaggctgttgtccttgggagatcatgttacagatagtcacaaccagctgtggcaggtccctggttcctgggtgccactgtggctgtccacctgaagaagcaacggaatcactgccaccatcaatgaggtcctataactgcttatccccagagaagcaaggttagaatggacccttgggcaaagacacaaattcaaacacaagaacacaagagaaagaggaaggcagaagcttggctgtcctgcgtgcccaacatgacctctgcagtcaccgaggcctaaacgagccctcgagattagcactaagaactgcatttaaactattctgggcaacagcttctatttctgtgttggtttacatctttcctcacaaagtcacataagagtggagcagctaagggaggcttagcaacaatctgcagctgtggccattaagtcctgtagatcatggacaccgagggtcgggatgagcgccaaggatctcatgggaagagcttgcactcctcaacttctgcattttccccagggcatagcacagactgtcactcaccacttgtctttttgctgagacagctatgttctttaatcaggctgaaaatgctaggcacatctatagatggagcgcagcacgttccaaccttagtcaaggagatgagaaggggtgtgtgtggatggagcagtggacagcatgagggaggtgctacctgctttgggatgtctttgcaaccatgatggcagaaacacagagaagcaccatgaacaggtcctgcaatcgacccctcgacagggagatgccatgtgtcctgttaaggcaggtgttagctgggttttctgatagcagctagaaactagcacagttaacaggttggttccctgaaggccacacaggaaccttccaaagttcagactctattcagaagcctaagtagtctggtcctgagcttcgcttcatgaccaatgtaaagaaatgccaatagcaggtcaaaccaagtcgggctgtccttttttctggggagagtctgtataaattgtttttattttattttggttttttgagatagagtttttctgtgtagctttggagcctgtcctggaactcgatctgtggatcagggtagcctcaaacccagagatccgtgtgccaccatcgccaggcgaattgctgttttcttatagtgtttgtttagggatgttacgtagctatttcctcttaactgaaatattccttcccagagggaggtccataagacccaggaaatgagggaaacttatagcacctaggaaactgctgaaagtggtcagattcacaagcctccccttccccctagggtcataagcagcaatctattgcagagggccaacagcctgcaagctgttggtggaactcctgggatgaagttttcctgggttgtcactcatgctgggggtgggtttctccttagtaaccccttatattactgtgaacaacctaaataaacccactggttcactaagctagtgtgggtggagttgtttctttggtctatagatggcatcctatctgggacaaacagctgtttgttcgaatcctcccaaggaaattatggatcggggtgtgatagttaatctcaattgtcaacttgttgagatagatctagaccagtggctctcaaccttcctaatgctgagaccctttaatacatgttgtagtagtccctgagcagaaaattattttcatttttatttcaccttattttgctactgttgtgactcatgctaatacctgtttttcaatggtcatttgaccatcaaagggttgcaaactacaggttgagaaccactgatctagaataatctacaaaacaggcctctggttatgcctgttggggattatcctgacgagttaacaggtgtgaagactactgtgggtggcaccattcaggaggcagaagcaggtggatctctgagtttgaggccagtcctgatctacggagcgagttccagaacagccagggcagctacacagagaaaccctgtctcgaaaaacaacagaaacccttgcataaggggtgataaggaaaaaaaaaacaacaacaaaattttgggaaatacaagttctcaactactccagttccaaactattattgagtttaaacagctgatctgccgactccatgttagggtgccacaaagcaccacctatgggagtgcagtctttccaaagcttcaagatgtggctcatccaagagctgcccaatagatagttcaggaagccaagatggctggctccttttccattttaatcgggagaatatgaacagtgggtgtccctgggatgttgatgccaccaggaaggcagcaccaggtggccaccgccccaagcatccatcagcactcatactggcttgactgtctgctggctccatagcttgaactcttggtttggaagaaacagaatcctttaaaattgtgtgtctgaaattcgtatcaaatgctgagcagacagatagatcacaactcaaagctctattactggctggaaaccaaagttgcatgttggcttattcaaatctagacagcccagccagtcccccggtgagtagcagcacatggctaaaattagcctggccatctgctgaaccagcagctgggctattctaagccccagagaggctgcctgcaagtggagctgggcctctcatggaatgagccagaggcctgctgctttgtggtcaagggagaggacaggactgccagccattctggaaagaaaccagggtcatggtggggttcgtggaggcggaaatgcagagctagatccagtctttattttctggtttctttctttcctggacttcctgtttgcatacagacactggcaatatcgttctcttgacctcagcagcaatggtctaacctgtttagtacttgtcatagacggggggttgagtgcttcacagggaccagtgtttacatcctcaagataactaagatggatgccagatttggctcacttagaagagtcacaattatgttggggactgtggcttcaatgacctgtggagttgtaggcctcctgtagatccccatcttctgccaccagaagagaggaacagtatcccagagttaagactctatttaaatatatagtcacttgtcatcagaaagccgtctcaggtagtttctctttgactgtaggcaacacacccagtggttgccccagccttacctctgcagttggtcataaagccttagctggtacttactcccaggaggacagcactgaagtatagtgagacggcagggtcctgctggccaacggaccggaggaatgcagtgcctcttgggccctctgggaacacaggcatgtgctgcactgtgacattatggtcagaaacagctggggatggtgctgaggatgctgtccgagggcagctcgccaggtgggcagagtgtgcctctgtcgcaccagcacttagatcccggttctttggacacacaaacatgtgtcctgtaactgagctatgcccaagtccatgttttaaatttatagattggctgatctcatctttggttgctgtggtaatctgaaatggccccaaagactcattggaaatggcactattacgaggtatggctttggtagaggaaatgggaagggttgaggcttcagaagctccagacaggcctagtggctcactgtctcttcttgctgcctacagatatggaactatctctctgacaccatgtctgcctgcatgctaccaggctttccaccacgacagtaatggaataaacctataagccaccaccagttattttcttttgtaagagtagctgtggcataagcctttaattccagcactcggcaggcagatctctatgagttagaggacagtctggtctaagaacaagttccaggacagccagggatacacagagaaaccctgcattaaaaaaaacaaaagacctttgttattctcagggtaagacttgaatttctcccctacccccacgacagaggtttttctgtagttgtagaagtcaagagatcagcctgtccgtgcctccgagtactgggattaaaagcatgtgttaccactgcctggtcagacttgaatttcttaaacatggaagggaacccattgagtgatatccccaaactaaaaacactatgcttaaccaggcattgggagggtagctgcttttctctgctgtcgaaaggttaatggttgggtaggctggagacgttcatcaagctagacactgcaaaggtcagaacgtgactgcccagcaaccagtacccatatccctcatcagagacccaacacgtcctcacatcccgcagtgtaactgcagtcacacacctgcaggtcacaaatgacactaactgctcaaactagaaaattttaagggttccccgcccccttgccttgggtgtgttctgccttttgtttttcctcacaaaaaaacaaaaacaaaaaacaaccccaagcttggaagttcttgggttcttgggttaggggatgttaggggatgctatgatcctgggtctgtgcctcctgcctttggcttgtcagccctagctcccctctgtaaaaggtcaaaaggggctctgactttcagagctgaatgttaacattcacctgtcattttctttcttttttgaaaaaagatttattatgtatatagtgttctgcctgcatgtatccctgcaggtcagaagagggcaccagatctcattacagatggttgtgagctaccatgcgttttccaggaatttaacttaggactgctggaagaacagccagtgctcttaacctctgagccatctctccagccttcagctatcatttttaaattccagatagctctaggatgatgccctgtggctttgggatggcatagtgaatctcactgccttaccaagtattagtaatctgaagggacactcttggggttcagtgctatgggggttcatacctacagggcctctacaggtcactgtgaagataaccacaaccctgtcagaggagatgagccacacaacataggaacagatagctatttgcattttaattgagaactattagccctttgggcagctatactgattacaggaggttcaatttggaagacaaaattactcacggatgaatcaagaatcccaaatgcaactctgaactgaccacatcacacattcagtttccccatttacgtgcttcaggaagctcctcctttttcagttaccccatatctatcactgaaaaccaaaaaaaaaaaacaaaaaaacaaaaaaacaaaaacaaaaacaaaaaaacccaaaagcccagaaggctaacaaggggacaataagtacaagataaaagaaatctatatagtatgaaattagtttttatttttagcttaaaataaatgcttaacattttgccaaaatcaaaccaaagacgaacctttgaaaaaagggaggaagcacatttcccttccctgtgggaaccagtaaggcagacattgtggctgtgacgtggcttttccccctcaagactagtctaggcaaacaaaacaaaaacctctccccaactttccctctactgtcagccgtgtctatcagggctatgcctggtaggataaaacccctaacaaccctcccaccgagtgcaacacggacaagggacttgaacccagagccctttaacctgtctatatagaaccctaaggagatcgggtgagggtgccaccattaggcagcggtgtggctgaggttttgtggtgtctgtggtgtggaggcaccagggggaagtttacccctaggcttgggtgctgggtgcagcacacccctcacacttcaccacagggatgtcttaaaattaaacttcagtttcagcaggtatttcaggttcacctgagcaatgtcatagacgatgtacctgggagggcagtagttaaggagccaaccgttgagtttcctgaccttcctcacactgaatcctctgaagctggggaaggctggtccccagagagaccatccatgggaaaaagttgtcactatccccagataagctgccctgggcagtgagagcatacatacacacctgctgtacagttccagaacacatggcatagccacgaaaggatactcgttatatagtaggcaggtgtcattaacacccgatgggatccctgtccccagtggaacctctacaccctccagggtgatgctggccgaagggtcaggggtcgttttgcccaagcctgtaaggtagaagggtcaaatatgacgggatgtgcaagaaggcatgggaaaaggtcctggttacctgatgtctactcacacagatgagtgtgtacttcaaacatccttcagacgcaaacacggaagctataaaggttctacggtgcctatctaaccctgggaagtccctgaggcccagatgggagtgctgcctattcaacagctccacgttcaccagaggtccctcgtggcctgatacagctggtcacaatgtcaggccaccagtgccctctcgtttggttcctggtgtcccacacaactcatatggcatcatgacactagctgaagcaacaaggaatcaaagtttcatttttaaatgaacctccagcaggcagttccaagagtccagcctttggagaaaagccctccccccatctgccatgccagcctggaggacagtacctttgacactgtgcttgcccttgggtaacttgctgatatgtgacgcatgcttgagttcgtacctattcaagagaggacaatctcagactagcccctggccactgggctcccaaaccagtattcatcagcatctttactgtcaggtaaactaaacgcccatagaaccctgtacacctttacaccagaccctcctttcccagctcctggactcttcagagcctagagtgttctcacgtatagagcctgcaacaactgtccatgctatgggttatttccaaagaaagggcctgcttggagctgtggccactgcttggaggtcccgtctagtccaccctatggcttagttcaccatgttgctcttttggtcacagcacacaggatcaggaggttgcccgaatgaagctggaggaattggaacttctctttgccagttcctggcacgcgtgggatttttatagcatctctgaatctcccttgatcccttcaaccactgtttactgtacttacaagccaagaatcctgacttctgagtccgctaactggtggggatttctgtgatcactgcctggccaaggagactctccttccagcgcactctacccacgctggcctcagagccgggatactcacatgtttccaagggcgacttctcccaacagtatcaagccaatcgggtctccctgagatgtatggcagtagttggcacttttggacaccatatcagcaaaatagatcccttttccaaacatgtagcctgtctggagagttgggagagggacagctgaaaaccttctaagagtaagtgaggcagtccagagaacacccatacgagccactggctaaagcctgcagccatcacctccgaggcactgccacagggctatgggaagtcacctaacagcttaggtcgctactgtctcctcacctggaagtctcatgagggtaatgtgaagatttaatgagttaataatcactatttttggactaggccagatagatgtatacatccagcaaacactggctactcctaatcccggttaagtaaagcacaaggcaacagtaaatgaagggctgggatggccacctcagaggccctgtccagttggtcccttctgtaacccagcaggtgatgtaactattccttgtcctctttatttagttggtggaaatacaggagctcatggagctgcatgcctgggctccaaagcgtgttctttgcatgtcaaatgttcaaccagccttcagagcatcctggtctagacacttttgttccagaagctgtctcaaacacgtgcagctgtactactgtgggctcagaggctctccacagctgtagtcttgacagggcgggctgtgggctcagaggctctccacagctctagtactgacagggtgagctgtgggctcagaggctctccacacctgtagtactgacagggtgagctgtgggctcagaggctctccacagctgtagtactgacagggtgagctgtgggctctccctgaagcacccagggctctttaatgagattactgcagaaacacacacttccacacttcatcgtacccaaagtcagccacctaccacaggtgcttcaggtggggctatccgcagaccctgtgacaggatgccagcaaagttggtggtcctggacccgtgccacagtaacctccgattgtgcagctgcttgaagggtttgtagcgctggctctctccctcacgctctatcttaaagatctgggcagacaattagcaagagggaggcagaaatactgtcactcaggttgactgaagagatgaacagactgatactgaccacctgtcccacgaactagaaaacttaggctttgctgcattatccacaggccaggatgggatgatccaatgtatatgtcccaaggctacactcgacagggacgagccgccatcaaaatacactaatatgcagcagatatgcacctaaggaactttttccttgagactaatctcactatgtagcccaggctggcttcggccctttcagtctcctgcctcagcctcccaagtgatgggactagagatgtgcactgcaccacaaaagagattctggtaatgacattttcggccagcctggtctaacagcaagcttcagaacagccaagactacagactgcgcctcaaaaaacaaaaacaaaaaagggaaaagcattcttacatccatcacttccaggtcataggcattgtgtgtggtggcatgagtgttcttaacatacttcctgatgacctcagcttcctcagagtctcggtcaaccacctggaaaacaggccacctggatcagggcagggagaccccacagagccccgtgaagatcatctgtatacaagcctagaggatgccaggagcagttcctactgtccaaacagtgacacccgcaggccgaggccaggccccaaacatcactttcttcatccacctggactgctagaaaggagctcaagggttcttgtctatgcactaagtatgagtcaagctagaaacagggttcattattagtaaggtgggaccaggagtccagctcactgatggaacacaaggtaacatcatacaatttccctgtccccaccccagtcctaaggacgggatcaagggccttgcacacacccagtgaccactctgccactgaactatccccccagccctgctatggggctccgaggacagtgtgtgtgtgtgtgtgtgtgtgtgtgtgtgtgtgtgtgtgtgtgtgtgtgtgtatgatgtttagtgtgtgtggtgtgtatgatgtgtgtggtatgtgtgtagtgtgtgtgtgtgcatgtgtgtgtatgtttagtgtgtgtgttgtgtgtgtgtgtgtgatgtttagtgtgcagtgtgcagtgtgtgtgtgtgtagtgtgtgtggttggtgtgtgtgtgtgtgtgcatgtgtgtgtatgatgtttagtgtgtgtgttgtgtgtgtgtgtgtgtgtgatgtttagtgtgcagtgtgtgtgtgtgtagtgtgtgtggttggtgtgtgtgtgtgtgtgcatgtgtgtgtatgatgtgtgtgtgtgtttgttcgtgtgtgttttcctcatgctgactcagcacatgcccaacacgatgtcaacggaacccacactaagtaaaccgagcttctgcagaaggctacagatgttctttgttttcttattctatgtttagaaaacctacgagttctggttgtctttgttgcatcttaattacgagctttgtaactgtagatggaaataagagtgtcttcatcaagagccattaagaatggacatgtggcatcagcgcctgcttgtgaggcaagcaagcatagggaacagttcagctgccggggactccacttggtctgggctacataggcacccttctgatactgcactgttagtctgtgcacactcctctctgtccaatacacctaacaactcagcactcctctgtgcacagggctgcaggcacaccaacctccaaacactggagtaagttcctcctcttgacaaccatataacttagatagattctatttaattatattctagttatgtctggctaagagtaggaaggctgatcaagcttcagttggccttagatgcaaacacaacagggcaatttatgtcctttaggtgaactgcagaaattcttgtgctggctagtttcatgccaactcaacacagagctagagccactggatgaagccgcacctgagaaaatgcctttattagactgggctgcaagcaatcctataggcattttcttaattagcgattgatatggaagggcccagtccattttaggtggggccacccctgggctggtggtccagggttctataagaaaagcaggctgagcaagctatgaagagcaagcaagtaatcagcaccccttcctgagcttctgcctccaggttcctgccctgacttcctgacgatgaacgataaacccttcttccccaagttgctttggtcatggtgtttcatcacagcaacagtaagtagccctgactaggacaaatcccctctaccatttcatagctacattaaatggggcacccatgattaaaatcagatgcattatgggaaggatatacacaggggcaaaagacataatcaagtctgtcaaccaaaaaacagaggatcacccaacctatactactttttacaaacctgtgaggctttttatcctttgactaagaggcaaagaatctggaaacacctggtctagactccaatccccaggagtacttggaccatgatgggtccatgctgcctggcaggaacaaccagaggcagaagacaggcatgtcaggccaggagcagaggcacatagcctgggcagggcaattcccacatgccccagccttcaacacatccaagttcaactgactgcttgtgccccaaatagaaaaacaggaacttttggtaggactctcaaaatcttgcctccacaccaacctaaggcactagttagctccaaagactcctgcaggggggatcaaggaccaccatctggctctgtgagagggcaacttgaaggcctggctggacttttaatgagatgtggaaatggctccagtgcacatggaggttggggaccacggctcttgggaaggggcaggcctctcaccttaatgtcagttttgagcttctcatagttgacatcaatggggtccttactgctgtcatcagacccccccctgagaagactataggccacctcaatgtccaggaggttgtccagcatctccaccttggcctggggacaaaataaagacctgtgagctaagttcgtagggaagatgactatcaagccttaacagaagtcagtatgtagatgacttcccacacagtgtgtgtgtgtgtgtgtgtgtgtgtgtgtgtgtgtgtgtgtacctctttgttgaccagagtctgccatcatctctcactcaacagttgatagtcacaggcattccctgacatgctaatgaggctctgatggctggggaagtgtggggcagatgtcagagctcttacacatgaatgataggcagggaaatagatgccactaaggatgccactaactgatctcagccagggacttatgggggcctttagatggataaagagaaatggtcttcttggctagtgacaatttcctagacttacttggtaaaacaatggaaagaaacattagatcctgttctgaaagaacacagtaaggatagtccaggagtcaggggcctattacctgcacgctgtctgcattgttcaggagtgggggcttcttcattccgaagtcatgggggattagggtgtagaatcgattggaaagatccaggatctgggagtcactgctgccttgggacactgcctgaaaggaaaggggacagaaggaacataggaccgaggctgctattgtatgcacaagcgttattatacactccatacttagcgctagtgcaaactctatgtggtgggctcatggctactgttgtaaaacttgttttttatgtggaaacagttcagctgggcatggtggcacatgcctctaaacccagcacccaaaggcaggtggatctgagtttcaggccattgagcgtcatacagagaggccatctcaaacacagaaacaaaaggaaaattgttcacgatgtcgggggcatgagccagaaagagctggaaagccccagcaatgttggtggagggagggacacaaggtcaattctcagaggcacccggattctacagctcaccatgggctcagctctccagcatctcaccctcaaatataaggggagctttctcatctcttgagtatgtactagaaagccctagggcggcaaacacacaaaataaaactctccaccaaatttctaaagtgtttattacatatgtgctaactagaagcatcactatttgtatatttcattaacaatctttggcctgtaatacagtgacagggactgtaatagttactgaactggaaaaaaagaaatccaaatccacataaaccatggttctgtactgtcactgttttaccacacagtagatgcggctgctgtctctcactaggagagaagctggcctggctggaaaccctgaggtgctcgcttacctgctggacctcactaaggatagagtaggcggcctggatctgccttttgctcagcttccccaagggcatcttctgaaggtcaatctggggagacaggggacgtaaaggctgggtattctgtccagtgctgaagggcactgctccctcaaaactcagtggcccactgcacaggagtcacaaccctttaccccaccctgcactctgtgtaagaaagagcagcccaacgatacagctcagaggcaaagtcatctctaccaatccccacaggaccaaggtgatggactgagcctcccactgcaggctgcattgcccaggactccagaggaagggtaccttctgccatccagttcagaaactagagcctcaaatttccaagtggtgaatgttattttttaggaacacacacctaatttgacacttccctttcaaatcagccaccctaggaggctacgcatttgttgtcaacaacactttgagtaaccacaccacctcaggatccactgttaatcaggatctcaagctgagatggcagaagcatggtcattttgtcagtgacaaaaagatgacaggtaaactgtttcaagggccacctacccctccctgcgagtgaactggcctatgttcactgagtgcttgagctgagacacctgtgtgctacaagatccaacactctttgccctaagactgtggcactgggcacacctaccagagtggcttgatttgcacagcagcctacagcttctgggctcatggctgtggagcaggaggccacgtggctggccaagtatggaggtctcctcctgcctcaattgctgggaagattggaggcgagatgaaacaggctctgcctgacttagcctgtggtccctgccatgcaggcccaatcaagagcatcattgtttcaactgctagtatttctcttttaaccttcccttcctctttttttgcttcatatgtgaagccagcactctaccacagctacacccaactttatttatttatttattttggttttttgagaaagggtttctctgtggctttggaggctgtcctagaactagctcttgtagaccaggctggtctcgaactcacagagacccacctgcctctgcctcccgagtactgggattaaaggtgtcagaaagagctgacgagtttgactgattgactggaacatgggtcaagacagtggtggtcacaatttattgtctaaaattttaaaaattattttccatctatgattgttttgtcaccatgtatgcttgtatcctgcttgagtacttagtgtctgtggaggtcaaaagacagcatcaggttcctttggaacttgagttacagatggttgtgagccgccatgaatccaggtccaccgagagagcagtgagtgcagttatctacagtgcaatctctctccagccctttttctccagggaacaaagccttggacttccattggtatcacctagctgctatgtttgggtcccaaagaactagacctacccaccccaacaagaaataaaatggggacaggcacaagggggccagctctctacagtatattttacattccacagcagagtgacatttggcaagcaagagcagggatgaggatgtgggccccccatttttagagaggacaaattacaccggaaaacgtgccatgctcagcacccacctcgtattccaccaaggccttcttcatgctctccacgtcaaagatcatcccgacgagctcctgcactgccttcgggagctttgacttagtgccaggttttaccgtcagcttctttacagcctcttcatccttcaggacagcagggaaccccgaagaagacaaagggtggtgtcatcatgggttacctacaggtaactatgatgcaagataggatatttgccagcaaaaccagccaaatgttcaccaaaactcttcagacaatggtggtcaggagggcttctgcacaggcaaaataattcccatgcattcccaagtcccagactggtccaggcccctgttttagctgttccgatgaagtgtggccctctctgggtatgctggtgcctacagaagcagctgccatgcacacccatgcccaccttagaaggatgactgctatgaaaatgatgttcagatcaacaggcaggaacctgtcagtagacagtctgccctttcccagcacctgttaacccagggccagctgcaggaacctgtctataagctttcccctacagcatctgtcgttatgctatctcatgttttgtcagccagctgaagcagaggcaggccagcctcatccagagctagttctaggacagctagggtcgttactcagagaaatcctgtctcgaaaaaccaaaaccaaaaactgattgcaaaaccaaccaacaaaccctcaacattccaaaagtaaacagtacctttaggtaggtattagtttactatggcagctgctggctacatgacaggccattgaggttttgaaactcgccacttttttgagtgctatgtaaatacaccaggtgtcatagtacaaacaggaaatgctcaacggttctgttggtatcaaatcatgttatgaagagaccatttgcacaatgctgggctaaattactaaggctagagtcatggtttctgctgcttcttttttctctcttctttttggtttttcgagacagggtttctctgtatagtttggagcctatccgcctgcctctgcctcccgagtgctgggattaaaggcgtgccccactatcgcccggctggttcctgcttcttatctgtctcacaccgtgctcctaggggaagtggtgtggagaaagtgtgtggggtgatcctgggccacgagggaagagatggtgtgtaccacatggtatgtgaaggcaggattccagtatcgtggtgaaactagccaggtgcagacacgtgccatgactttactatggctattcccatagtaaaatgactagttttattgtctgtgcctttctcaaaaaggttctgaaacaaatactgaagatatttaattcagtggagaacagaccaagcctgtccacctccaagttcaaggtctcagggtttcagcctcagcattatgtaagagctaaattctacttatttattcatttaaaacaaaacaccaaaataaataaaattaaaaaaaaaccacccaccagggtctcactatgtaacctgggtctcactatgtaaccagggtctcactatgtaacctgggtctcactatgcaacctgggtctcactatgtaacctgggtctcactatgtaacctggtggctatgatgagcagagtgacctcaagctcacagacatccacccacctctgctctctgcactgggatcagagatgtgagccaccacatcagcctctaaaattatttttaaaataatctattttattttatgtgcattggtgttttgccttcatgtactatgtctgtgtgagggtgtcagagggcacctagaattggagttagacagttgtgagctgccacacacagatgctagaaattgaacctaggtcctctggaagagcagtcaatacttttaaccactaagccatctctccagtaacctctaaattctattttttttataaagattttatttattatgtatacaacattctgcttccgtgtgtatctgcacaccaaaagagggcaccagatctcataaccgatggttgtgagccaccatgtggttgctgggaattgaactcaggacctctggaagagcagccggtgctcttaacctctgagtcatctctccagccccctaaattctgtttttaatgcggagctcacaacactacaatagaaataacttctcctctgtggcatgctagaccccaagttttggaaccaaaatctccacctgtggggcttagggcacccaatcccagcatttcccaggctgaagctaaagagcaagcccctagctcaagcaaacatgaacatctagctacaaaaatatcacctaagaggtaactgcatgctgtctggtaccacacagggagtttcagaatagataaagataagataatactgggtctattgctcgtgggtgtggcaacaactgtaactacacttacctatggctgctgagatgatcacgtgacttctgcccttccttcacgagggcatcctgacatgccaagcaacctcaatcatgggtttctactgcacgtggctgcacacattctcacacactgctgattgctaggggaggacttagcagcacaccacagacatgttcctgggtaacaccagcctcgtgcatgagccacaagttttcttccattttggggagaatttgtcacactgctgtcattaactcttgtcagagctgggtcactctctgagacaagggctcttttctgtaataggatgatgaaaaactataccatgattacctggccatagtcgatctccagagggtagaactttttgggatactttgtgaagttctttgagtgccaggcattgccagtcttctcttcatatagtttcatgaagtgctcaacagcatcctctttggatggcatctgctcaagtttgttactgccaatgacagtgcccactcggccccaggaccggaagatccagtatctgtaagagggtaagaagggcagacagccgggtgagcttctgctctgttccagggtctcctcagtaagggacagctgtcccctacctctgtgtagcgctggggtcctggaacttgctctgtagtccaggctggcctgcttcatgcaccaccactgtccactaaggaacaattttttccccccaagacaagggtttctctgtattctttgggaggctgtcctggaactcaactggtagactaggctgacctctaactctcagagatccgcctgtctctgcctcccgagtgctgggattaaaggtgtgcaccaccaatgcctggcctaagggacaattttaaaagcattccctttctcatttgttgaatgagtggtgctacagatggaacccagagccttgaacacaccaggcaaacacactacaattgagagaacttaaaacatgttgaaacaatcacctacattatagtgaccccagcaagtgtggaatggcattaaagaaccaatttaaatagaggtgttggtggcgcatgcctttaatcccagcacttgggaggtagaggcagatggatctcaagaatttgaggccagtttggtctacaaagcaagttccaggatagccatggctacacagagaaaccctgatttgaaaaacacataaacagaataaaatttaattttactatgtgtgcaacaataaatcacgaatcttgttttctttctaataactttaattttatgtgcattggtgtcaaagtgtcagatcttcaggaagtgcagccactgctcttaaccactgagccctatctctagcccctgtttttttttttttttttaatagctaaaagaatagtcctgtgatggttgagccaaccatagcaacattaacagatggccagtagctgcaatttctttatggagtttttgtgaggagttctcctgttcaaggcctgacttcccaaggtgggtagcacatactaagccctgaggcatctgtccccagctcacctgctctccttgtcatcctccagaagctgcagcttgtaataggagttggtccctttcacaatgtccaccaggccaagtgtggcactgaacaccttcccgcctttctccaggacgtgtgcagagtgttccagacctgccccagaggcaaagctcctatagttttttccccctgaagggctagggtgcaacagagaggtctgtgggcctaggagtccccagtcagttgcatgttccaccacctttagaggctctcccactggcccacatgcttccaggactgcctggcaagcaaaggatgcctgctcccctctggctactctctgaactgcaggtaatctcctaatcacccaggggagggggaggggggtggccgactcctcatcactcaccagagtcaggatcaacagccgctcctccctttagagttagtttcatcctcttttcagacttgttgacacctggagaaagggcaggaccacagagaccaaactaagactacaaagacagaacaggttcccgaggcgagcagcaaggcagcggggtaacactgcactgaggctaccgctcactggagcgagcgctgcacttcagggacacggcagctggacctcaccttcctccttgacagggcccttgctcttcttggagggtgcagctgacttccccttgggggccgccacttcaacaggctcgaccttcacctcagccccccaagaggataagctgtgggcggagagcagctcttggagactcttagtggaggcagccacgtcctggaggaagtcctcacacacaaccctcacgttggctgcttgcacttcctccatcttcttacccatcttttccacctcctctgtttaaacccagaaaggaaaaagaaaaaaagaaaagccaagcaagccataagctgaaaagtaagcctggaactgcagctatcaaagccccagaattcgaatgacctcatcaacaacacgtcttcccttccaaacagtacagcctgagcctcttcatctgacagttatgtccagtggcatccgctgcccctcgggtatggaatgccaagggaggccaccttctccaaaccttccgtgtggtgttggcaggtacttgacagaaatggtctctcgggctcagacctgaacactcagcagtacagtctagaaaaatggacctggctccatcaccagactgaagtagtaatctccaccctacctactacggaaccaattcctctccattttcacatctttgttctggcagcgaacatgggaacctcccatagaacactggagcttattatggtctgtggctgggaatgtgagccactgtgaacacacaatacacaatacaaatactagtttaccttccagcaatggtgatgagaacctgaaccccagctgtgccagccacatccactagccccacacacattcaagagacacaggtgccttaaactcacttttagtgctgatacacaaggaagccttgttggctgatcccgtcaacttgcccccgagtttctcaatcgtggcctttgcttcatctttgctctgagagagtttaccgagagtcaggatcttcatgttagacagcggcttatctgggacaagagagcagaagcatcaggctaggcccagcaaaggacaaagcgaagcaagacagaaaaaaaccaaaaccaaccaaccaaccaaacaaaaaaatcaaccccccaaagcagagggttccatgggagaaaccatgagcatggccagcattgggaaaaatcttaggaagacagaagccaacagccagtgggaggaccaaggggcagaacagtgaacttgaggacccatgagctctgcaacagagaaactggggaggaataagccacagaacaggttggaccaggtgggctactagaggcagactagagaggctgcatctggagatgggaacagaatgctgggaggggaagtggcaagtcccaactcttgaggaacaaagtgcagatcagactccttggtgacaacactgaaggcctccgtcagtgtgctcacactgagccgacctgttccaggcaaagcagagcaagctataccaagtgcccagcactgactgtcaggctggcatgggcagggccttttgggagctgaaggtgagaatgcagcactggatacagccaggtcacagcttcgtatcgctactgggggatatctagcctgtcctctctagggggtgaatgttgaggataccaatcgaatctcaatgaagtctctgtagagaacaaaatctctgatttgggtgtgaattgcacagaggaaacagcagagaaggacctgcaagtaaggaccctaactgacctccatgtgcacatgaagaccctaggcttcaagcagcagagaggacttggggtaaccagcgctcactactaggggtggaacagatgaagctgggctagtgtccagaagcagaaccttgccctctacccagcccactatggcctccacctttgcgggtcaagagtctacatgcctctaggagcacgcagcatttctcttgccaacaaaacacacagatctcactgcttccaacggtccagggcatgtcaactcatgactgggatctccccaggatcttgatggcagctgggacagggaggagactgggcccggagactggggatgtgctttgcagtactttgtgtggtatattctgactgtccctaaagaacgctgtccactcagcaaacagagcacaggatacccactgcgttattctatgtccttgcacgacatagctcctgggtcaaatcccggccctatccttcccagagtcatacctgctggggcagaggagttcacagccgtgggtgcggaggtgacagagggtggaggtgccggcggcgctggggcactggtctctggagggaatatccggtcttgttttttgacctttaatttcttgaggtaggatatttctcggaattcctaaacaatgataagttttagttttaaaggccaagtgggatttttttttttttttgagtcaggtttctctgtatagctttgtagactgggctgacctccaactcagagatccacctatctctgcctcccaagtgctggaattaaaggcatgcgctaccaccacctggctcacaaattaatcttaaaaaatttctgtaatggataggaaagtgaagttccaggaagaaagcttgttattgtcaccacttacaggacacccacactgcagaagaaactcctacacgttcccccctgaccatggtacacatgcccctccccaaaataaaagtgatttttaaaaaacaaaataaaaaaccactagacaacttggtgagagaagactcactagtgcaaggacatatgccaggaccgcccttgtccttgggtcacttctctctagtgtccacaggggcctatctcacagctgaacgctctaggccagagggggcggtgggcgtgcagtgtggcgcacacctttagtcccagcactggggaaggcagaggcaggcagatctctgtgggtttgaggacagtctggtctacacagtgagttctaggccagcgaggactatatagagacaatgaatactattcagcatcaaaatccaatcaactacccagctacaggcaaacctgactgcacgtccccaagcgaaggaagctaacatgaggggctgtaagcacagcacactcaaagcgttctagaccagccagccacgggagatctagaagagttacaacagagttgataaaaaggtcagtggcttccagaggctggctgagagtctcagggcaatgcatgaaaaacgatactttcctaatggacacatttcagtctacatttatcaaaacccacaggctgtgccaccaagacttggccctactgtaaactatgactgtgggtgatggcatgttagtgcaggctcattggttttaatggatgcaccactctgctgcagggtatccacactggggaggctgcgaggaatccaaaacaaaaacaaaaccaacaactcacacacccagtgacagatttacaagttttccaaagaagaccaggttaagcccccttgcttgttagggaggaacacctgtatcaagccctctttcattcatcaggaactatcaaccggcacagttctttctgtatcccaggtgactcacagcagtaggcttgccctagggagggcagtgatcacttgatgacgcctcatccagccacatccaagcggctctggtgaagagcagtctctgtgctctcaagtccccctcttcagaaaggaacttcctagttgtacctatgttcagattcccttcctgtctgactctacttcccagggttcccacaggctacttatgttaccaggtgcaaatcagaaagctgggcaagttgagattttaaaggcgaggaaatgctaaagtcgggtaggctgtggaaaggcaggcagagaagactgggagggagagtacaattacagcagaaacagaggaagagagaatgaactcttcttggcattgattatgaggaagggtgggagcagggactgtctgtcatcttaggacctgcatggagtgtggatgagggagtcgtggcttcccacccacacccttacctttggtgtcacccattcctttcggctgggagtctgtgtcttgaccatgcacttggtccaggcagtgacatccccagtgcagtagtaagcatcactcttaaagaccagctggcctgaacactccttgcagggcaggagggccccaaacgccatgccatcagcaactcggtccaagatctgaagaaacatgtcagaggtaagagggtcaggaaaggacagccactaacgcagatggaggacctctcaaacaggccctatttcctagaaagaggctgtctctgggctctaccatagctcaggtgccagcttacaacacagtccaggctttacacttttggaacccttatctctgagtgaagggttcctgaggcaatccccacctcaggaaatcacagaaagcaacattcaccctacctaccacacaaggagtggcccaagcaggtgcagggtggccttagcagccccgggacacatggcagtaggtagcagaggtccttaggccagtgtgatatgaacacatgaggcaaaagtacctgctcaccttgggatctcaccaagttctaaaccaggacaaacatgtggcaatgtatggtatagctgaggatgcctccagactgaaggagacggtgataatgatcatacaacaatgccctggagctgtgacttcctgaagggcctcctatgtaccccgccctaacacaaaggcaagctcactgtgaactctgtgtgtcccccctaacacaaaggcagctcactgtggactctgtgtgtccccctaacacaaaggcagctcactgtggactctgtgtgtccccctaacacaaaggcagctcactgtggactctgtgtgtcccccctaacacaaaggcagctcactgtggactctgtgtgtccctctaatgcaaaggcagctcaccgcagactctccagatggtacttgctgctggttgaagataagcaactcctttaggtcactggtggaacatgctttcttcagttcatctttgatgttccagatcaggtcattctgggcctgagaatgagatccccaacaactgagatcagtttttaaaaaactttattaatattattttactactgtaaattaaaaaatattagatccatttagtaatgtgtgcatgctcacacgttccatagcatatgtatgtaggtcagaaaataacttgtgggaactggttctctccttccgtaatttaagtttttttggacaaagggtctctctattatgcagccctagccgtctggaacttgctatgtatcccaggctagccttgaacttacacagatccgcctgtctctgcctcccaagtgttggaattaaggtgtgtgttagcacatccagaccccaaaatacagcatttatagatcaaactcaagaggactagtggtcagctgaggggctggtggatgctgccttggtcttgaggctggccaaagggcatctgggggtatggttggttgccactgaggcagggggtataggtatccttctgggttaatgaaaggcctgggctgtaaacttcaaaagttcaagcggtaacttttagggagagactggggtaagacaggatctcactcaggaacccaggctggcctccaaactcatggcaattctcctgcctcagcctttgctggactaatgagttaatcaagggctaccttgattaacaaaatggctcagtgggtataactacttgctactagcctaatgacctgagtttgaaccctaggactccactgtagaagaactgaatcctgctggctgtcccttgacctacacaagcacacatgacaattaatataaatatattaatattaattaattaacaattaattataaatcagattggagagatggcttagagattaagagcactggctgttcttccagaggtcctgagttcaattcccagctcccacatggtagcttacaaccatctagaacgagatctgtgccctcttctggcatataggcatatatgcagacaggacactatacataataaatacatcttaaaaaaaaaaatcaaacggagttggagagcttgagagatggctcagtggttaagagcatttactgcttttacaaaggacttaggtttggtcatcataacccacatggctcccaaccatctccttgggcatcaggcaagcatgtagtgcacaaacaaagacactagactaggtggacagtgtctttattggctggactcttatcactggaatggcaggctctgacattgaaccctccacggcacactcttgatggagctgggctgttcctcaaaggcagctggaccaacaacaccctcagccagggtttaactttcaggcaaacccatgtgtacttcaaaataaactcacgcaatactcttttagaaaacattctggaaagtatagaggagactgcttttaagactgaatccctgttgggtgatagtggtacacacctttaatcccagcactcgggaggcagaggcaggcagagtttgagtgaggccagtctggtctacagaatgaatttcagaacagccaaggctacacagagaaacccggtcttgaaaaaccaagactgaatcctttattacacggagccctggtgtcaacccctcagaaacctgttttaagagacacagagagcaaccagaagttctgggtagggctaagagcctcaattatcttttccaacacccacttagattgcatagtctcccacacacttgcgctcaagcaggaatctctgtgggctcttctggaactttagtctactaaggcccactttttgctggtgctttaagtcccctcatttattctcacaacttcctgccgaggaggtgggccaagatgagcctccaccttccctggggcgtcaggcaaggtgggcatcacacaccaggctgcaccccgagacagaaaggggaatgctggccctacgctatcacacaggctgcttcaacgccaggagagacattcaactctgactgatgccatcaccacacacactccctgcctccccattccagtgctgggctctctgggacatcctctgcatctctccccagagcggagcacatactgataccagaagcagcaattcatgaacacaagtttcacagaaatggcagacctatttctcttttaaagctgaggacagagacagattggggtagaagaagctgagaggttaattcaaatttctgtcttgcttttcgtcactggcaacactggggacagaacatcagcacacccacccaagggactgcaaagacatcaaagtaaaaatggataaaaatcaaacatggggctggagagacgtctcagttaagagcactggctgctctcgcagaggacttgggttaattcacagcaccaacatggcagctcataaccttctctagttctagttccaaagaatccagtaccttcttctggcctctgtaggtagcaaacacacatgtgatacacacacaggcagccaaaacaccttgcccccaaagggaaaggaaagctggttgaacttcacattcattcaagcagagggctctaccagtcaaaaccagattactgagccactagcaaaagctgaaaatcacaaactcagacagacggcccctgaaaaaccatgttcccagaagagacctactgttctctgcccaaacagcatagccaacagtgatgaacccctctggttgttttttgtttttgtttttttttttttcttccaaggcagggtttctctgtgtagctttggctgtattggaactcagtctgtagatcaggctggcatagaactcagaaatctgcctgcctctgcctctcaggtgctgggatggggagattcctttttactgaatgctttccagtcctttgttaaattttaaaactaggaaaactttctcctgaggccccaaggtagagtctatgctaagaacctctggtgtaggatggtcagtgacgcctgggttggaccagaacatcactttgtgtcacctagtgagtctgaggacatgagacattctacactgcaggcctggcacttgagcccaatgtgtcccaccacccaaataaaaatgacttctgtgagggggggaggagaacaagttgggacaaaagccttgtgtctcaagagcagccatgcaagcaagaatttacactggtcttggtaagtagggacagctgatgtcctcctgcacgagaagggacagaaaggagacagcccaggactcaccttgagggccttttccagcttactgtccttgtcctttcccttcttagatttctttttggccacctcatctgctccatccacctcatcaccttttctttttctgaaagacacaggacttaataagacccagagccctcaggccgacacccagcaccaccaggttaacaagcctcatgtcatcttaaccccatttagctgcctcttcctctgccctctttcccactcggctctagggagctgcttctgacagcgaggggcctggcactcaactcagagtccagaacagccacgacagacaaagagctcaggtcacaccggatgctaaactccatgtctcttacacaccaagagacggggaatcgtggaaaagccaaacacagctacaagaactgaacctgggcagtggtggcgcacacctctaatcccagcactgggaaggcggatctctgagttcgaggccagcctggtctacagaatgagttctaggacagccatgactgttacacagagaaaccctgtcttggaaaaacaaaaaccaacaaagaaccaagcctagagtgagacccagggctgctccccaggccaccatgcagcctgactgagcgctaggggagcaccagtatggactacggtgacacgggaggaaacagctcactcaggcacagggctgaggggaaggcctagcacacaatcgtgctcaacatactccagttctccaggcatattggtagccaataaatcccaacgccctgtgctgtaaaagcccaaggacatcctcaccactggcctgacttgctagcttcacactccagagccactggtacagctccatgagcttgtgtcaggatctggaaccgtgcaagcttcttggtgacagtggtacagatactgttcacgagcatagtacataggtctatgaccctcagcacgttcattaaccagccaccccagatgacagctgcacgtgtgggcccatctgttctgattccaggccctgcccttcctgctgtccatccacatatgaatagccgtgtttctcccagagatccagacacagaacagctctaccgcacgactgcagtgacgcgcagagccttacagggcggtgaaccttggccattcagctgtgctggtcc
